(19) United States
(12) Patent Application Publication
(10) Pub. No.: US 2023/0357324 A1
(43) Pub. Date: Nov. 9, 2023

(54) IMPROVED DEPENDOPARVOVIRUS PRODUCTION COMPOSITIONS AND METHODS

(71) Applicant: DYNO THERAPEUTICS, INC., Watertown, MA (US)

(72) Inventors: Jeffrey GEROLD, Watertown, MA (US); Eric KELSIC, Watertown, MA (US); Sam SINAI, Watertown, MA (US); Adrian VERES, Watertown, MA (US); Samuel WOLOCK, Watertown, MA (US)

(21) Appl. No.: 18/042,890

(22) PCT Filed: Aug. 26, 2021
(86) PCT No.: PCT/US2021/047700

§ 371 Date: Feb. 24, 2023

Related U.S. Application Data
(60) Provisional application No. 63/070,763, filed on Aug. 26, 2020.

(51) Int. Cl. C07K 14/005

(52) U.S. Cl. CPC C07K 14/005; C12N 2750/14122; C12N 2750/14151; C12N 2750/14143; C12N 2840/50

(57) ABSTRACT

The disclosure is directed in part to improved methods of making dependoparvovirus particles utilizing a nucleic acid comprising an open reading from encoding membrane-associated accessory protein (MAAP) comprising an exogenous start codon.

### CROSS-REFERENCE TO RELATED APPLICATIONS

[0001] This application claims priority to U.S. Provisional Application No. 63/070,763, filed Aug. 26, 2020, which is hereby incorporated by reference in its entirety.

### BACKGROUND

[0002] Dependoparvoviruses, e.g. adeno-associated dependoparvoviruses, e.g. adeno-associated viruses (AAVs), are of interest as vectors for delivering various payloads to cells, including in human subjects.

### SUMMARY

[0003] The present disclosure provides, in part, improved methods of producing a dependoparvovirus, compositions for use in the same, as well as viral particles produced by the same. The disclosure is based, in part, on the discovery that a cell comprising a mutated open reading frame (ORF) encoding Membrane-Associated Accessory Protein (MAAP) when used to produce dependoparvovirus exhibits an improvement in a production characteristic involved in production of a dependoparvovirus particle. Such production characteristics include, e.g., an increase in the amount of dependoparvovirus polypeptide or particle produced intracellularly, an increase in the amount of correctly folded dependoparvovirus polypeptide, an increase in the amount of dependoparvovirus particle secreted from the cell, or an overall increase in the amount of dependoparvovirus particle produced. In an embodiment, the improvement is relative to what is seen with an otherwise similar cell comprising an ORF encoding MAAP not comprising the mutation, e.g., the improvement is relative to a unit of time or resource expended or relative to an otherwise similar cell comprising an ORF encoding MAAP not comprising the mutation. Without wishing to be bound by theory, the presence of an exogenous start codon in the ORF encoding MAAP is thought to improve one or more production characteristics associated with production of dependoparvovirus in a cell.

[0004] In one aspect, the disclosure is directed, in part, to a nucleic acid comprising a sequence encoding an ORF for a functional dependoparvovirus B MAAP which ORF comprises an exogenous start codon. In some embodiments, the dependoparvovirus B is an adeno-associated dependoparvovirus (AAV). In some embodiments, the AAV is AAV5.

[0005] In another aspect, the disclosure is directed, in part, to a dependoparvovirus particle comprising a nucleic acid described herein (e.g., a nucleic acid comprising a sequence encoding an ORF for a functional dependoparvovirus B MAAP which ORF comprises an exogenous start codon). In some embodiments, the dependoparvovirus particle is of a different clade or strain than the ORF encoding the dependoparvovirus B MAAP. In some embodiments, the dependoparvovirus particle is of the same clade or strain as the ORF encoding the dependoparvovirus B MAAP.

[0006] In another aspect, the disclosure is directed, in part, to a vector, e.g., a plasmid, comprising a nucleic acid described herein (e.g., a nucleic acid comprising a sequence encoding an ORF for a functional dependoparvovirus B MAAP which ORF comprises an exogenous start codon).

[0007] In another aspect, the disclosure is directed, in part, to a cell, cell-free system, or other translation system comprising a nucleic acid described herein (e.g., a nucleic acid comprising a sequence encoding an ORF for a functional dependoparvovirus B MAAP which ORF comprises an exogenous start codon). In some embodiments, the cell, cell-free system, or other translation system comprises a vector described herein. In some embodiments, the cell, cell-free system, or other translation system comprises a dependoparvovirus particle described herein.

[0008] In another aspect, the disclosure is directed, in part, to a dependoparvovirus B MAAP polypeptide (e.g., a mutant polypeptide), an amino acid of which (e.g., the first amino acid) corresponds to an exogenous start codon. In some embodiments, the dependoparvovirus B MAAP polypeptide (e.g., a mutant polypeptide) is encoded by a nucleic acid described herein. In some embodiments, disclosure is directed to a purified or isolated preparation of a dependoparvovirus B MAAP polypeptide described herein.

[0009] In another aspect, the disclosure is directed, in part, to a cell, cell-free system, or other translation system comprising a dependoparvovirus B MAAP polypeptide (e.g., a mutant polypeptide), an amino acid of which (e.g., the first amino acid) corresponds to an exogenous start codon. In some embodiments, the cell, cell-free system, or other translation system comprises a vector described herein. In some embodiments, the cell, cell-free system, or other translation system comprises a dependoparvovirus particle described herein.

[0010] In another aspect, the disclosure is directed, in part, to a nucleic acid comprising a sequence encoding a VP1 polypeptide, wherein the VP1 encoding sequence comprises a change or mutation corresponding to or arising from the presence of sequence encoding an exogenous start codon in the MAAP polypeptide encoding sequence. Without wishing to be bound by theory, in the dependoparvovirus genome the sequence encoding VP1 overlaps with the sequence encoding MAAP. In some embodiments, the sequences encoding MAAP and VP1 are in different reading frames. In some embodiments, a mutation that creates an exogenous start codon in an ORF encoding a MAAP polypeptide alters the amino acid sequence of the VP1 polypeptide.

[0011] In another aspect, the disclosure is directed, in part, to a dependoparvovirus particle comprising a nucleic acid described herein (e.g., a nucleic acid comprising a sequence encoding a VP1 polypeptide, wherein the VP1 encoding sequence comprises a change or mutation corresponding to or arising from the presence of sequence encoding an exogenous start codon in the MAAP polypeptide encoding sequence).

[0012] In another aspect, the disclosure is directed, in part, to a VP1 polypeptide described herein (e.g., wherein the VP1 encoding sequence comprises a change or mutation corresponding to or arising from the presence of sequence encoding an exogenous start codon in the MAAP polypeptide encoding sequence, e.g., wherein the exogenous start codon in an ORF encoding a MAAP polypeptide alters the amino acid sequence of the VP1 polypeptide).

[0013] In another aspect, the disclosure is directed, in part, to a vector comprising a nucleic acid described herein, e.g., a nucleic acid comprising a sequence encoding a VP1 polypeptide, wherein the VP1 encoding sequence comprises a change or mutation corresponding to or arising from the presence of sequence encoding an exogenous start codon in the MAAP polypeptide encoding sequence.

[0014] In another aspect, the disclosure is directed, in part, to a cell, cell-free system, or other translation system comprising a nucleic acid or vector described herein, e.g., comprising a sequence encoding a VP1 polypeptide, wherein the VP1 encoding sequence comprises a change or mutation corresponding to or arising from the presence of sequence encoding an exogenous start codon in the MAAP polypeptide encoding sequence. In some embodiments, the cell, cell-free system, or other translation system comprises a dependoparvovirus particle described herein, e.g., wherein the particle comprises a nucleic acid comprising a sequence encoding a VP1 polypeptide, wherein the VP1 encoding sequence comprises a change or mutation corresponding to or arising from the presence of sequence encoding an exogenous start codon in the MAAP polypeptide encoding sequence.

[0015] In another aspect, the disclosure is directed, in part, to a cell, cell-free system, or other translation system comprising a VP1 polypeptide described herein, wherein the VP1 encoding sequence comprises a change or mutation corresponding to or arising from the presence of sequence encoding an exogenous start codon in the MAAP polypeptide encoding sequence. In some embodiments, the cell, cell-free system, or other translation system comprises a dependoparvovirus particle described herein, e.g., wherein the particle comprises a nucleic acid comprising a sequence encoding a VP1 polypeptide, wherein the VP1 encoding sequence comprises a change or mutation corresponding to or arising from the presence of sequence encoding an exogenous start codon in the MAAP polypeptide encoding sequence.

[0016] In another aspect, the disclosure is directed, in part, to a method of delivering a payload to a cell comprising contacting the cell with a dependoparvovirus particle comprising a nucleic acid described herein. In another aspect, the disclosure is directed, in part, to a method of delivering a payload to a cell comprising contacting the cell with a dependoparvovirus particle comprising a VP1 polypeptide described herein.

[0017] In another aspect, the disclosure is directed, in part, to a method of making a dependoparvovirus particle, comprising providing a cell, cell-free system, or other translation system, comprising a nucleic acid described herein (e.g., a nucleic acid comprising a sequence encoding an ORF for a functional dependoparvovirus B MAAP which ORF comprises an exogenous start codon); and cultivating the cell, cell-free system, or other translation system, under conditions suitable for the production of the dependoparvovirus particle, thereby making the dependoparvovirus particle. In some embodiments, the disclosure is directed, in part, to a method of making a dependoparvovirus particle described herein.

[0018] In another aspect, the disclosure is directed, in part, to a method of making a dependoparvovirus particle, comprising providing a cell, cell-free system, or other translation system, comprising a polypeptide described herein, a dependoparvovirus B MAAP polypeptide (e.g., a mutant polypeptide), an amino acid of which (e.g., the first amino acid) corresponds to an exogenous start codon; and cultivating the cell, cell-free system, or other translation system, under conditions suitable for the production of the dependoparvovirus particle, thereby making the dependoparvovirus particle. In some embodiments, the disclosure is directed, in part, to a method of making a dependoparvovirus particle described herein.

[0019] In another aspect, the disclosure is directed, in part, to a dependoparvovirus particle made in a cell, cell-free system, or other translation system, wherein the cell, cell-free system, or other translation system comprises a nucleic acid encoding a dependoparvovirus B MAAP ORF comprising an exogenous stop codon or a MAAP polypeptide encoded by the MAAP ORF.

[0020] In another aspect, the disclosure is directed, in part, to a method of treating a disease or condition in a subject, comprising administering to the subject a dependoparvovirus particle described herein in an amount effective to treat the disease or condition.

[0021] The invention is further described with reference to the following numbered embodiments.

### ENUMERATED EMBODIMENTS

[0022] 1. A nucleic acid comprising a sequence encoding an ORF for a functional dependoparvovirus B (e.g., an adeno-associated dependoparvovirus (AAV), e.g. AAV5) MAAP polypeptide, which ORF comprises an exogenous start codon.
[0023] 2. The nucleic acid of embodiment 1, wherein a cell, cell-free system, or other translation system, comprising the nucleic acid packages, secretes, and/or produces dependoparvovirus (e.g., dependoparvovirus A or B, e.g., an adeno-associated dependoparvovirus (AAV), e.g. AAV5 or a serotype other than AAV5) particle at a level of at least 50% or more than that of a cell, cell-free system, or other translation system, comprising an otherwise similar nucleic acid that does not comprise the exogenous start codon.
[0024] 3a. The nucleic acid of either of embodiments 1 or 2, wherein the sequence comprises a change or mutation at a position between or including nucleotides 14 to 250 of a VP1 encoding sequence (e.g., a sequence encoding AAV5 VP1, e.g., SEQ ID NO: 327) that creates an exogenous start codon at the position.
[0025] 3b. The nucleic acid of any of embodiments 1-3a, wherein the sequence comprises a change or mutation at any of the positions listed in columns 4 or 5 of Table 1, or at a site one or two nucleotides downstream of said position, that creates an exogenous start codon at the position.
[0026] 4. The nucleic acid of any of the above embodiments, wherein the change or mutation is relative to a reference sequence.
[0027] 5. The nucleic acid of embodiment 4, wherein the reference sequence comprises a wildtype sequence, e.g., SEQ ID NO: 331, or a sequence with at least 90 or 95% sequence identity with a wildtype sequence, e.g., SEQ ID NO: 331.
[0028] 6. The nucleic acid of any of the above embodiments, wherein the exogenous start codon is at a position listed in columns 4 or 5 of Table 1.
[0029] 7. The nucleic acid of any of the above embodiments, wherein the functional dependoparvovirus B (e.g., AAV5) MAAP polypeptide ORF:
   [0030] (a) mediates detectable translation initiation in a cell, e.g., a human cell, cell-free system, or other translation system, or
   [0031] (b) if present in a cell, cell-free system, or other translation system, otherwise competent for producing dependoparvovirus particles, allows for the production of dependoparvovirus particles.
[0032] 8. The nucleic acid of any of the above embodiments, wherein the MAAP polypeptide comprises an amino acid sequence with at least 80% sequence identity to SEQ ID NO: 325.
[0033] 9. The nucleic acid of any of the above embodiments, wherein the MAAP polypeptide comprises an amino acid sequence with at least 85% sequence identity to SEQ ID NO: 325.
[0034] 10. The nucleic acid of any of the above embodiments, wherein the MAAP polypeptide comprises an amino acid sequence with at least 90% sequence identity to SEQ ID NO: 325.
[0035] 11. The nucleic acid of any of the above embodiments, wherein the MAAP polypeptide comprises an amino acid sequence with at least 95% sequence identity to SEQ ID NO: 325.
[0036] 12. The nucleic acid of any of the above embodiments, wherein the MAAP polypeptide, except for the amino acid specified by the exogenous start codon, differs from the sequence of SEQ ID NO: 325, by no more than 20 amino acid residues.
[0037] 13. The nucleic acid of any of the above embodiments, wherein the MAAP polypeptide, except for the amino acid specified by the exogenous start codon, differs from the sequence of SEQ ID NO: 325, by no more than 15 amino acid residues.
[0038] 14. The nucleic acid of any of the above embodiments, wherein the MAAP polypeptide, except for the amino acid specified by the exogenous start codon, differs from the sequence of SEQ ID NO: 325, by no more than 10 amino acid residues.
[0039] 15. The nucleic acid of any of the above embodiments, wherein the MAAP polypeptide, except for the amino acid specified by the exogenous start codon, differs from the sequence of SEQ ID NO: 325, by no more than 5 amino acid residues.
[0040] 16. The nucleic acid of any of the above embodiments, wherein the MAAP polypeptide, except for the amino acid specified by the exogenous start codon, differs from the sequence of SEQ ID NO: 325, by no more than 2 amino acid residues.
[0041] 17. The nucleic acid of any of the above embodiments, wherein the MAAP polypeptide differs from the sequence of SEQ ID NO: 325 in a pattern specified by a CIGAR string listed in column 8 of Table 1.
[0042] 18. The nucleic acid of any of the preceding embodiments wherein the exogenous start codon is an ATG, CTG, GTG, ACG, TTG, ATT, ATC, ATA, or AGG.
[0043] 19. The nucleic acid of any of the preceding embodiments wherein the exogenous start codon is an ATG.
[0044] 20. The nucleic acid of any of embodiments 1-18, wherein the exogenous start codon is an CTG.
[0045] 21. The nucleic acid of any of the above embodiments, wherein the sequence encoding the exogenous start codon results in an amino acid change in VP1.
[0046] 22. The nucleic acid of any of embodiments 1-20, wherein the sequence encoding the exogenous start codon does not result in an amino acid change in VP1.
[0047] 23. The nucleic acid of any of the above embodiments, wherein the MAAP polypeptide comprises one, two, three, four, five, or all of:
   [0048] an N-terminal disordered region, optionally capable of binding to a polypeptide;
   [0049] a short hydrophobic region comprising a beta-strand, optionally capable of binding to a polypeptide;
   [0050] a T/S rich disordered region, optionally enriched in charged amino acids;
   [0051] a region devoid of predicted secondary structure, optionally capable of binding to a polypeptide;
   [0052] a disordered region, optionally capable of forming an alpha-helix, or
   [0053] a C-terminal amphipathic region comprising an alpha-helix, optionally capable of binding a membrane.
[0054] 24. The nucleic acid of any of the above embodiments, wherein the MAAP polypeptide comprises from most N-terminal to most C-terminal, one, two, three, four, five, or all of:
   [0055] an N-terminal disordered region, optionally capable of binding to a polypeptide;
   [0056] a short hydrophobic region comprising a beta-strand, optionally capable of binding to a polypeptide;
   [0057] a T/S rich disordered region, optionally enriched in charged amino acids;
   [0058] a region devoid of predicted secondary structure, optionally capable of binding to a polypeptide;
   [0059] a disordered region, optionally capable of forming an alpha-helix, and
   [0060] a C-terminal amphipathic region comprising an alpha-helix, optionally capable of binding a membrane.
[0061] 25. The nucleic acid of any of the above embodiments, wherein the MAAP polypeptide comprises, from most N-terminal to most C-terminal:
   [0062] an N-terminal disordered region, optionally capable of binding to a polypeptide;
   [0063] a short hydrophobic region comprising a beta-strand, optionally capable of binding to a polypeptide;
   [0064] a T/S rich disordered region, optionally enriched in charged amino acids;
   [0065] a region devoid of predicted secondary structure, optionally capable of binding to a polypeptide;
   [0066] a disordered region, optionally capable of forming an alpha-helix, and
   [0067] a C-terminal amphipathic region comprising an alpha-helix, optionally capable of binding a membrane.
[0068] 26. The nucleic acid of any of the above embodiments, wherein the MAAP polypeptide comprises at least 80, 85, 90, 95, 100, 105, 110, 115, or 116 amino acids (e.g., a full length MAAP polypeptide) and optionally no more than 120, 119, 118, 117, 116, 115, 110, 105, or 100 amino acids.
[0069] 27. The nucleic acid of any of the above embodiments, wherein the ORF encoding MAAP comprises a nucleic acid sequence with at least 80, 85, 90, 91, 92, 93, 94, 95, 96, 97, 98, 99, or 100% identity to any of SEQ ID NOs: 4, 8, 12, 16, 20, 24, 28, 32, 36, 40, 44, 48, 52, 56, 60, 64, 68, 72, 76, 80, 84, 88, 92, 96, 100, 104, 108, 112, 116, 120, 124, 128, 132, 136, 140, 144, 148, 152, 156, 160, 164, 168, 172, 176, 180, 184, 188, 192, 196, 200, 204, 208, 212, 216, 220, 224, 228, 232, 236, 240, 244, 248, 252, 256, 260, 264, 268, 272, 276, 280, 284, 288, 292, 296, 300, 304, 308, 312, 316, or 320.
[0070] 28. The nucleic acid of any of the above embodiments, wherein the ORF encoding MAAP comprises a nucleic acid sequence that differs by no more than 20, 19, 18, 17, 16, 15, 14, 13, 12, 11, 10, 9, 8, 7, 6, 5, 4, 3, 2, or 1 nucleotides from the sequence of any of SEQ ID NOs: 4, 8, 12, 16, 20, 24, 28, 32, 36, 40, 44, 48, 52, 56, 60, 64, 68, 72, 76, 80, 84, 88, 92, 96, 100, 104, 108, 112, 116, 120, 124, 128, 132, 136, 140, 144, 148, 152, 156, 160, 164, 168, 172, 176, 180, 184, 188, 192, 196, 200, 204, 208, 212, 216, 220, 224, 228, 232, 236, 240, 244, 248, 252, 256, 260, 264, 268, 272, 276, 280, 284, 288, 292, 296, 300, 304, 308, 312, 316, or 320.
[0071] 29. The nucleic acid of any of the above embodiments, wherein the MAAP polypeptide comprises an amino acid sequence with at least 80, 85, 90, 91, 92, 93, 94, 95, 96, 97, 98, 99, or 100% identity to any of SEQ ID NOs: 3, 7, 11, 15, 19, 23, 27, 31, 35, 39, 43, 47, 51, 55, 59, 63, 67, 71, 75, 79, 83, 87, 91, 95, 99, 103, 107, 111, 115, 119, 123, 127, 131, 135, 139, 143, 147, 151, 155, 159, 163, 167, 171, 175, 179, 183, 187, 191, 195, 199, 203, 207, 211, 215, 219, 223, 227, 231, 235, 239, 243, 247, 251, 255, 259, 263, 267, 271, 275, 279, 283, 287, 291, 295, 299, 303, 307, 311, 315, or 319.
[0072] 30. The nucleic acid of any of the above embodiments, wherein the MAAP polypeptide comprises an amino acid sequence that differs by no more than 20, 19, 18, 17, 16, 15, 14, 13, 12, 11, 10, 9, 8, 7, 6, 5, 4, 3, 2, or 1 amino acids from the sequence of any of SEQ ID NOs: 3, 7, 11, 15, 19, 23, 27, 31, 35, 39, 43, 47, 51, 55, 59, 63, 67, 71, 75, 79, 83, 87, 91, 95, 99, 103, 107, 111, 115, 119, 123, 127, 131, 135, 139, 143, 147, 151, 155, 159, 163, 167, 171, 175, 179, 183, 187, 191, 195, 199, 203, 207, 211, 215, 219, 223, 227, 231, 235, 239, 243, 247, 251, 255, 259, 263, 267, 271, 275, 279, 283, 287, 291, 295, 299, 303, 307, 311, 315, or 319.
[0073] 31. The nucleic acid of any of embodiments 2-30, wherein the dependoparvovirus particle is a dependoparvovirus A particle.
[0074] 32. The nucleic acid of any of embodiments 2-30, wherein the dependoparvovirus particle is a dependoparvovirus B particle.
[0075] 33. The nucleic acid of any of embodiments 2-32, wherein the dependoparvovirus particle is an adeno-associated dependoparvovirus (AAV) particle.
[0076] 34a. The nucleic acid of embodiment 33, wherein the AAV particle is an AAV5 particle.
[0077] 34b. The nucleic acid of embodiment 33, wherein the AAV particle is a particle of a serotype other than AAV5.
[0078] 35. The nucleic acid of any of the above embodiments, wherein the MAAP polypeptide is an AAV5 MAAP polypeptide.
[0079] 36. The nucleic acid of any of the above embodiments, further comprising a sequence encoding a dependoparvovirus, e.g., dependoparvovirus B, e.g., an AAV5, VP1 polypeptide.
[0080] 37. The nucleic acid of embodiment 36, wherein the VP1 polypeptide comprises an amino acid sequence with at least 80% sequence identity to SEQ ID NO: 321.
[0081] 38. The nucleic acid of either of embodiments 36 or 37, wherein the VP1 polypeptide comprises an amino acid sequence with at least 85% sequence identity to SEQ ID NO: 321.
[0082] 39. The nucleic acid of any of embodiments 36-38, wherein the VP1 polypeptide comprises an amino acid sequence with at least 90% sequence identity to SEQ ID NO: 321.
[0083] 40. The nucleic acid of any of embodiments 36-39, wherein the VP1 polypeptide comprises an amino acid sequence with at least 95% sequence identity to SEQ ID NO: 321.
[0084] 41. The nucleic acid of any of embodiments 36-40, wherein the VP1 polypeptide, except for the amino acid specified by the exogenous start codon, differs from the sequence of SEQ ID NO: 321, by no more than 20 amino acid residues.
[0085] 42. The nucleic acid of any of embodiments 36-41, wherein the VP1 polypeptide, except for the amino acid specified by the exogenous start codon, differs from the sequence of SEQ ID NO: 321, by no more than 15 amino acid residues.
[0086] 43. The nucleic acid of any of embodiments 36-42, wherein the VP1 polypeptide, except for the amino acid specified by the exogenous start codon, differs from the sequence of SEQ ID NO: 321, by no more than 10 amino acid residues.
[0087] 44. The nucleic acid of any of embodiments 36-43, wherein the VP1 polypeptide, except for the amino acid specified by the exogenous start codon, differs from the sequence of SEQ ID NO: 321, by no more than 5 amino acid residues.
[0088] 45. The nucleic acid of any of embodiments 36-44, wherein the VP1 polypeptide, except for the amino acid specified by the exogenous start codon, differs from the sequence of SEQ ID NO: 321, by no more than 2 amino acid residues.
[0089] 46. The nucleic acid of any of embodiments 36-45, wherein the sequence encoding the VP1 polypeptide comprises a nucleic acid sequence with at least 80, 85, 90, 91, 92, 93, 94, 95, 96, 97, 98, 99, or 100% identity to any of SEQ ID NOs: 2, 6, 10, 14, 18, 22, 26, 30, 34, 38, 42, 46, 50, 54, 58, 62, 66, 70, 74, 78, 82, 86, 90, 94, 98, 102, 106, 110, 114, 118, 122, 126, 130, 134, 138, 142, 146, 150, 154, 158, 162, 166, 170, 174, 178, 182, 186, 190, 194, 198, 202, 206, 210, 214, 218, 222, 226, 230, 234, 238, 242, 246, 250, 254, 258, 262, 266, 270, 274, 278, 282, 286, 290, 294, 298, 302, 306, 310, 314, or 318.
[0090] 47. The nucleic acid of any of embodiments 36-46, wherein the sequence encoding the VP1 polypeptide comprises a nucleic acid sequence that, except for the amino acid specified by the exogenous start codon, differs by no more than 20, 19, 18, 17, 16, 15, 14, 13, 12, 11, 10, 9, 8, 7, 6, 5, 4, 3, 2, or 1 nucleotides from the sequence of any of SEQ ID NOs: 2, 6, 10, 14, 18, 22, 26, 30, 34, 38, 42, 46, 50, 54, 58, 62, 66, 70, 74, 78, 82, 86, 90, 94, 98, 102, 106, 110, 114, 118, 122, 126, 130, 134, 138, 142, 146, 150, 154, 158, 162, 166, 170, 174, 178, 182, 186, 190, 194, 198, 202, 206, 210, 214, 218, 222, 226, 230, 234, 238, 242, 246, 250, 254, 258, 262, 266, 270, 274, 278, 282, 286, 290, 294, 298, 302, 306, 310, 314, or 318.
[0091] 48. The nucleic acid of any of embodiments 36-47, wherein the VP1 polypeptide comprises an amino acid sequence with at least 80, 85, 90, 91, 92, 93, 94, 95, 96, 97, 98, 99, or 100% identity to any of SEQ ID NOs: 1, 5, 9, 13, 17, 21, 25, 29, 33, 37, 41, 45, 49, 53, 57, 61, 65, 69, 73, 77, 81, 85, 89, 93, 97, 101, 105, 109, 113, 117, 121, 125, 129, 133, 137, 141, 145, 149, 153, 157, 161, 165, 169, 173, 177, 181, 185, 189, 193, 197, 201, 205, 209, 213, 217, 221, 225, 229, 233, 237, 241, 245, 249, 253, 257, 261, 265, 269, 273, 277, 281, 285, 289, 293, 297, 301, 305, 309, 313, or 317.
[0092] 49. The nucleic acid of any of embodiments 36-48, wherein the VP1 polypeptide comprises an amino acid sequence that, except for the amino acid specified by the exogenous start codon, differs by no more than 20, 19, 18, 17, 16, 15, 14, 13, 12, 11, 10, 9, 8, 7, 6, 5, 4, 3, 2, or 1 amino acids from the sequence of any of SEQ ID NOs: 1, 5, 9, 13, 17, 21, 25, 29, 33, 37, 41, 45, 49, 53, 57, 61, 65, 69, 73, 77, 81, 85, 89, 93, 97, 101, 105, 109, 113, 117, 121, 125, 129, 133, 137, 141, 145, 149, 153, 157, 161, 165, 169, 173, 177, 181, 185, 189, 193, 197, 201, 205, 209, 213, 217, 221, 225, 229, 233, 237, 241, 245, 249, 253, 257, 261, 265, 269, 273, 277, 281, 285, 289, 293, 297, 301, 305, 309, 313, or 317.
[0093] 50. The nucleic acid of any of the above embodiments, further comprising a sequence encoding a dependoparvovirus, e.g., dependoparvovirus B, e.g., an AAV5, VP2 polypeptide.
[0094] 51. The nucleic acid of embodiment 50, wherein the VP2 polypeptide comprises an amino acid sequence with at least 80% sequence identity to SEQ ID NO: 322.
[0095] 52. The nucleic acid of either of embodiments 50 or 51, wherein the VP2 polypeptide comprises an amino acid sequence with at least 85% sequence identity to SEQ ID NO: 322.
[0096] 53. The nucleic acid of any of embodiments 50-52, wherein the VP2 polypeptide comprises an amino acid sequence with at least 90% sequence identity to SEQ ID NO: 322.
[0097] 54. The nucleic acid of any of embodiments 50-53, wherein the VP2 polypeptide comprises an amino acid sequence with at least 95% sequence identity to SEQ ID NO: 322.
[0098] 55. The nucleic acid of any of embodiments 50-54, wherein the VP2 polypeptide differs from the sequence of SEQ ID NO: 322 by no more than 20 amino acid residues.
[0099] 56. The nucleic acid of any of embodiments 50-55, wherein the VP2 polypeptide differs from the sequence of SEQ ID NO: 322 by no more than 15 amino acid residues.
[0100] 57. The nucleic acid of any of embodiments 50-56, wherein the VP2 polypeptide differs from the sequence of SEQ ID NO: 322 by no more than 10 amino acid residues.
[0101] 58. The nucleic acid of any of embodiments 50-57, wherein the VP2 polypeptide differs from the sequence of SEQ ID NO: 322 by no more than 5 amino acid residues.
[0102] 59. The nucleic acid of any of embodiments 50-58, wherein the VP2 polypeptide differs from the sequence of SEQ ID NO: 322 by no more than 2 amino acid residues.
[0103] 60. The nucleic acid of any of the above embodiments, further comprising a sequence encoding a dependoparvovirus, e.g., dependoparvovirus B, e.g., an AAV5, VP3 polypeptide.
[0104] 61. The nucleic acid of embodiment 60, wherein the VP3 polypeptide comprises an amino acid sequence with at least 80% sequence identity to SEQ ID NO: 323.
[0105] 62. The nucleic acid of either of embodiments 60 or 61, wherein the VP3 polypeptide comprises an amino acid sequence with at least 85% sequence identity to SEQ ID NO: 323.
[0106] 63. The nucleic acid of any of embodiments 60-62, wherein the VP3 polypeptide comprises an amino acid sequence with at least 90% sequence identity to SEQ ID NO: 323.
[0107] 64. The nucleic acid of any of embodiments 60-63, wherein the VP3 polypeptide comprises an amino acid sequence with at least 95% sequence identity to SEQ ID NO: 323.
[0108] 65. The nucleic acid of any of embodiments 60-64, wherein the VP3 polypeptide differs from the sequence of SEQ ID NO: 323, by no more than 20 amino acid residues.
[0109] 66. The nucleic acid of any of embodiments 60-65, wherein the VP3 polypeptide differs from the sequence of SEQ ID NO: 323, by no more than 15 amino acid residues.
[0110] 67. The nucleic acid of any of embodiments 60-66, wherein the VP3 polypeptide differs from the sequence of SEQ ID NO: 323, by no more than 10 amino acid residues.
[0111] 68. The nucleic acid of any of embodiments 60-67, wherein the VP3 polypeptide differs from the sequence of SEQ ID NO: 323, by no more than 5 amino acid residues.
[0112] 69. The nucleic acid of any of embodiments 60-68, wherein the VP3 polypeptide differs from the sequence of SEQ ID NO: 323, by no more than 2 amino acid residues.
[0113] 70. The nucleic acid of any of the above embodiments, further comprising a sequence encoding a dependoparvovirus, e.g., dependoparvovirus B, e.g., an AAV5 or serotype other than AAV5, Cap polypeptide.
[0114] 71. The nucleic acid of embodiment 70, wherein the Cap polypeptide comprises an amino acid sequence with at least 80% sequence identity to SEQ ID NO: 321.
[0115] 72. The nucleic acid of either of embodiments 70 or 71, wherein the Cap polypeptide comprises an amino acid sequence with at least 85% sequence identity to SEQ ID NO: 321.
[0116] 73. The nucleic acid of any of embodiments 70-72, wherein the Cap polypeptide comprises an amino acid sequence with at least 90% sequence identity to SEQ ID NO: 321.
[0117] 74. The nucleic acid of any of embodiments 70-73, wherein the Cap polypeptide comprises an amino acid sequence with at least 95% sequence identity to SEQ ID NO: 321.
[0118] 75. The nucleic acid of any of embodiments 70-74, wherein the Cap polypeptide, except for the amino acid specified by the exogenous start codon, differs from the sequence of SEQ ID NO: 321, by no more than 20 amino acid residues.
[0119] 76. The nucleic acid of any of embodiments 70-75, wherein the Cap polypeptide, except for the amino acid specified by the exogenous start codon, differs from the sequence of SEQ ID NO: 321, by no more than 15 amino acid residues.
[0120] 77. The nucleic acid of any of embodiments 70-76, wherein the Cap polypeptide, except for the amino acid specified by the exogenous start codon, differs from the sequence of SEQ ID NO: 321, by no more than 10 amino acid residues.
[0121] 78. The nucleic acid of any of embodiments 70-77, wherein the Cap polypeptide, except for the amino acid specified by the exogenous start codon, differs from the sequence of SEQ ID NO: 321, by no more than 5 amino acid residues.
[0122] 79. The nucleic acid of any of embodiments 70-78, wherein the Cap polypeptide, except for the amino acid specified by the exogenous start codon, differs from the sequence of SEQ ID NO: 321, by no more than 2 amino acid residues.
[0123] 80. The nucleic acid of any of the above embodiments, further comprising a sequence encoding a dependoparvovirus, e.g., dependoparvovirus A or B, Rep polypeptide, e.g, encoding an AAV5 or serotype other than AAV5 Rep polypeptide.
[0124] 81. The nucleic acid of any of the above embodiments further comprising a sequence encoding an AAV2 Rep gene.
[0125] 82. The nucleic acid of either of embodiments 80 or 81, wherein the Rep polypeptide comprises an amino acid sequence with at least 80% sequence identity to any of SEQ ID NOs: 333-336.
[0126] 83. The nucleic acid of any of embodiments 80-82, wherein the Rep polypeptide comprises an amino acid sequence with at least 85% sequence identity to any of SEQ ID NOs: 333-336.
[0127] 84. The nucleic acid of any of embodiments 80-83, wherein the Rep polypeptide comprises an amino acid sequence with at least 90% sequence identity to any of SEQ ID NOs: 333-336.
[0128] 85. The nucleic acid of any of embodiments 80-84, wherein the Rep polypeptide comprises an amino acid sequence with at least 95% sequence identity to any of SEQ ID NOs: 333-336.
[0129] 86. The nucleic acid of any of embodiments 80-85, wherein the Rep polypeptide differs from the sequence of any of SEQ ID NOs: 333-336, by no more than 20 amino acid residues.
[0130] 87. The nucleic acid of any of embodiments 80-86, wherein the Rep polypeptide differs from the sequence of any of SEQ ID NOs: 333-336, by no more than 15 amino acid residues.
[0131] 88. The nucleic acid of any of embodiments 80-87, wherein the Rep polypeptide differs from the sequence of any of SEQ ID NOs: 333-336, by no more than 10 amino acid residues.
[0132] 89. The nucleic acid of any of embodiments 80-88, wherein the Rep polypeptide differs from the sequence of any of SEQ ID NOs: 333-336, by no more than 5 amino acid residues.
[0133] 90. The nucleic acid of any of embodiments 80-89, wherein the Rep polypeptide differs from the sequence of any of SEQ ID NOs: 333-336, by no more than 2 amino acid residues.
[0134] 91. The nucleic acid of any of embodiments 36-90, wherein one or more or all of the VP1, VP2, VP3, Cap, or Rep polypeptides is, respectively, an AAV5 VP1, VP2, VP3, Cap, or Rep polypeptide.
[0135] 92. The nucleic acid of any of embodiments 36-90, wherein one or more of the VP1, VP2, VP3, Cap, or Rep polypeptides is, respectively, not an AAV5 VP1, VP2, VP3, Cap, or Rep polypeptide.
[0136] 93. The nucleic acid of any of the above embodiments, further comprising an AAV Cap gene that comprises a sequence encoding VP3, VP2, VP1, AAP, Rep, or X gene that does not naturally occur in an AAV5 genome.
[0137] 94. The nucleic acid of any of embodiments 36-93, wherein one or more (e.g., all) of the VP1, VP2, VP3, or Cap polypeptides is an AAV5 VP1, VP2, VP3, or Cap polypeptide, and the Rep polypeptide is an AAV2 Rep polypeptide.
[0138] 95. The nucleic acid of any of the above embodiments, wherein the nucleic acid comprises a mutation, e.g, at any of the positions listed in columns 4 or 5 of Table 1, or at a site within two nucleotides of said position, that creates the exogenous start codon.
[0139] 96. The nucleic acid of embodiment 95, wherein a mutation at the positions listed in columns 4 or 5 of Table 1, or at a site within two nucleotides of said position, results in a silent nucleic acid mutation in VP1.
[0140] 97. The nucleic acid of embodiment 95, wherein a mutation at the positions listed in columns 4 or 5 of Table 1, or at a site within two nucleotides of said position, results in an amino acid change in VP1.
[0141] 98. The nucleic acid of embodiment 97, the amino acid change in VP1 is a conservative change.
[0142] 99. The nucleic acid of any of embodiments 36-95, 97, or 98, wherein the polypeptide sequence encoded by the dependoparvovirus Cap gene, e.g., the VP1 polypeptide sequence, comprises a mutation (e.g., a substitution) corresponding to the exogenous start codon in the MAAP polypeptide ORF.
[0143] 100. The nucleic acid of any of embodiments 36-94 or 96, wherein the polypeptide sequence encoded by the dependoparvovirus Cap gene, e.g., the VP1 polypeptide sequence, does not comprises a mutation (e.g., a substitution) corresponding to the exogenous start codon in the MAAP polypeptide ORF.
[0144] 101. The nucleic acid of any of embodiments 36-100, wherein the polypeptide sequence encoded by the dependoparvovirus Cap gene, e.g., the VP1 polypeptide sequence, comprises a mutation corresponding to a difference between any of SEQ ID NOs: 1, 5, 9, 13, 17, 21, 25, 29, 33, 37, 41, 45, 49, 53, 57, 61, 65, 69, 73, 77, 81, 85, 89, 93, 97, 101, 105, 109, 113, 117, 121, 125, 129, 133, 137, 141, 145, 149, 153, 157, 161, 165, 169, 173, 177, 181, 185, 189, 193, 197, 201, 205, 209, 213, 217, 221, 225, 229, 233, 237, 241, 245, 249, 253, 257, 261, 265, 269, 273, 277, 281, 285, 289, 293, 297, 301, 305, 309, 313, or 317, and a wildtype VP1 polypeptide sequence, e.g., SEQ ID NO: 321.
[0145] 102. The nucleic acid of any of embodiments 36-101, wherein the VP1 polypeptide differs from the sequence of SEQ ID NO: 321 in a pattern specified by a CIGAR string listed in column 7 of Table 1.
[0146] 103. The nucleic acid of any of embodiments 70-102, wherein the polypeptide produced from the Cap gene is functional.
[0147] 104. The nucleic acid of any of embodiments 70-102, wherein the polypeptide produced from the Cap gene is capable of assembling into a dependoparvovirus capsid.
[0148] 105. The nucleic acid of any of embodiments 70-104, wherein the polypeptide produced from the Cap gene is capable of packaging dependoparvovirus DNA into a dependoparvovirus capsid.
[0149] 106. The nucleic acid of any of embodiments 70-105, wherein a dependoparvovirus capsid assembled from the polypeptide produced from the Cap gene is capable of infecting a target cell.
[0150] 107. The nucleic acid of any of the above embodiments, wherein a cell, cell-free system, or other translation system, comprising the nucleic acid secretes functional dependoparvovirus particle at a level of at least 60, 70, 80, 90, 100, 110, 120, 130, 140, 150, 160, 170, 180, 190, 200, 250, 300, 350, 400, 450, 500, 600, 700, 800, 900, or 1000% that of a cell, cell-free system, or other translation system, comprising an otherwise similar nucleic acid that does not comprise the exogenous start codon.
[0151] 108. The nucleic acid of any of the above embodiments, wherein a cell, cell-free system, or other translation system, comprising the nucleic acid secretes more functional dependoparvovirus particle than a cell, cell-free system, or other translation system, comprising an otherwise similar nucleic acid that does not comprise the exogenous start codon.
[0152] 109. A dependoparvovirus particle comprising the nucleic acid of any of the above embodiments.
[0153] 110. The dependoparvovirus particle of embodiment 109, wherein the dependoparvovirus particle is a dependoparvovirus A particle.
[0154] 111. The dependoparvovirus particle of embodiment 109, wherein the dependoparvovirus particle is a dependoparvovirus B particle.
[0155] 112. The dependoparvovirus particle of any of embodiments 109-111, wherein the dependoparvovirus particle is an adeno-associated dependoparvovirus (AAV) particle.
[0156] 113. A vector, e.g., a plasmid, comprising the nucleic acid of any of embodiments 1-108.
[0157] 114. A cell comprising the nucleic acid of any of embodiments 1-108.
[0158] 115. A cell-free system comprising the nucleic acid of any of embodiments 1-108.
[0159] 116. A translation system comprising the nucleic acid of any of embodiments 1-108.
[0160] 117. A cell, comprising the vector of embodiment 113.
[0161] 118. A cell-free system comprising the vector of embodiment 113.
[0162] 119. A translation system comprising the vector of embodiment 113.
[0163] 120. A cell comprising the dependoparvovirus particle of any of embodiments 109-112.
[0164] 121. A cell-free system comprising the dependoparvovirus particle of any of embodiments 109-112.
[0165] 122. A translation system comprising the dependoparvovirus particle of any of embodiments 109-112.
[0166] 123. A dependoparvovirus B (e.g., AAV5) MAAP polypeptide, an amino acid of which corresponds to an exogenous start codon.
[0167] 124. The dependoparvovirus B (e.g., AAV5) MAAP polypeptide of embodiment 123, wherein a cell, cell-free system, or other translation system, comprising the MAAP polypeptide packages, secretes, and/or produces dependoparvovirus (e.g., dependoparvovirus A or B, e.g., an adeno-associated dependoparvovirus (AAV), e.g. AAV5 or a serotype other than AAV5) particle at a level of at least 50% or more than that of a cell, cell-free system, or other translation system, comprising an otherwise similar MAAP polypeptide that does not comprise the amino acid corresponding to the exogenous start codon.
[0168] 125. The dependoparvovirus B (e.g., AAV5) MAAP polypeptide of either of embodiments 123 or 124, wherein the amino acid corresponding to the exogenous start codon comprises a methionine.
[0169] 126. The dependoparvovirus B (e.g., AAV5) MAAP polypeptide of either of embodiments 123 or 124, wherein the amino acid corresponding to the exogenous start codon comprises a leucine.
[0170] 127. The dependoparvovirus B (e.g., AAV5) MAAP polypeptide of any of embodiments 123-126, wherein the MAAP polypeptide differs from the sequence of SEQ ID NO: 325 in a pattern specified by a CIGAR string listed in column 8 of Table 1.
[0171] 128. The dependoparvovirus B (e.g., AAV5) MAAP polypeptide of any of embodiments 123-127, wherein the MAAP polypeptide comprises an amino acid sequence with at least 80, 85, 90, 91, 92, 93, 94, 95, 96, 97, 98, 99, or 100% identity to any of SEQ ID NOs: 3, 7, 11, 15, 19, 23, 27, 31, 35, 39, 43, 47, 51, 55, 59, 63, 67, 71, 75, 79, 83, 87, 91, 95, 99, 103, 107, 111, 115, 119, 123, 127, 131, 135, 139, 143, 147, 151, 155, 159, 163, 167, 171, 175, 179, 183, 187, 191, 195, 199, 203, 207, 211, 215, 219, 223, 227, 231, 235, 239, 243, 247, 251, 255, 259, 263, 267, 271, 275, 279, 283, 287, 291, 295, 299, 303, 307, 311, 315, or 319.
[0172] 129. The dependoparvovirus B (e.g., AAV5) MAAP polypeptide of any of embodiments 123-128, wherein the MAAP polypeptide comprises an amino acid sequence that differs by no more than 20, 19, 18, 17, 16, 15, 14, 13, 12, 11, 10, 9, 8, 7, 6, 5, 4, 3, 2, or 1 amino acids from the sequence of any of SEQ ID NOs: 3, 7, 11, 15, 19, 23, 27, 31, 35, 39, 43, 47, 51, 55, 59, 63, 67, 71, 75, 79, 83, 87, 91, 95, 99, 103, 107, 111, 115, 119, 123, 127, 131, 135, 139, 143, 147, 151, 155, 159, 163, 167, 171, 175, 179, 183, 187, 191, 195, 199, 203, 207, 211, 215, 219, 223, 227, 231, 235, 239, 243, 247, 251, 255, 259, 263, 267, 271, 275, 279, 283, 287, 291, 295, 299, 303, 307, 311, 315, or 319.
[0173] 130. A dependoparvovirus B (e.g., AAV5) MAAP polypeptide encoded by the nucleic acid of any of embodiments 1-108.
[0174] 131. An isolated or purified preparation of the polypeptide of any of embodiments 123-130.
[0175] 132. The MAAP polypeptide or isolated or purified preparation of any of embodiments 123-131, wherein the MAAP polypeptide is an AAV5 MAAP polypeptide.
[0176] 133. A nucleic acid comprising a sequence encoding a VP1 polypeptide, wherein the VP1 encoding sequence comprises a change or mutation corresponding to or arising from the presence of sequence encoding an exogenous start codon in the MAAP polypeptide encoding sequence.
[0177] 134. The nucleic acid of embodiment 133, wherein the change or mutation is silent with respect to VP1 amino acid sequence.
[0178] 135. The nucleic acid of embodiment 133, wherein the change or mutation results in a change to the VP1 amino acid sequence.
[0179] 136. The nucleic acid of embodiment 135, wherein the change to the VP1 amino acid sequence is a conservative change.
[0180] 137. The nucleic acid of embodiment 135, wherein the change to the VP1 amino acid sequence is a non-conservative change.
[0181] 138. The nucleic acid of any of embodiments 133-137, wherein the VP1 polypeptide differs from the sequence of SEQ ID NO: 321 in a pattern specified by a CIGAR string listed in column 7 of Table 1.
[0182] 139. The nucleic acid of any of embodiments 133-138, wherein the sequence encoding the VP1 polypeptide comprises a nucleic acid sequence with at least 80, 85, 90, 91, 92, 93, 94, 95, 96, 97, 98, 99, or 100% identity to any of SEQ ID NOs: 2, 6, 10, 14, 18, 22, 26, 30, 34, 38, 42, 46, 50, 54, 58, 62, 66, 70, 74, 78, 82, 86, 90, 94, 98, 102, 106, 110, 114, 118, 122, 126, 130, 134, 138, 142, 146, 150, 154, 158, 162, 166, 170, 174, 178, 182, 186, 190, 194, 198, 202, 206, 210, 214, 218, 222, 226, 230, 234, 238, 242, 246, 250, 254, 258, 262, 266, 270, 274, 278, 282, 286, 290, 294, 298, 302, 306, 310, 314, or 318.
[0183] 140. The nucleic acid of any of embodiments 133-139, wherein the sequence encoding the VP1 polypeptide comprises a nucleic acid sequence that, except for the amino acid specified by the exogenous start codon, differs by no more than 20, 19, 18, 17, 16, 15, 14, 13, 12, 11, 10, 9, 8, 7, 6, 5, 4, 3, 2, or 1 nucleotides from the sequence of any of SEQ ID NOs: 2, 6, 10, 14, 18, 22, 26, 30, 34, 38, 42, 46, 50, 54, 58, 62, 66, 70, 74, 78, 82, 86, 90, 94, 98, 102, 106, 110, 114, 118, 122, 126, 130, 134, 138, 142, 146, 150, 154, 158, 162, 166, 170, 174, 178, 182, 186, 190, 194, 198, 202, 206, 210, 214, 218, 222, 226, 230, 234, 238, 242, 246, 250, 254, 258, 262, 266, 270, 274, 278, 282, 286, 290, 294, 298, 302, 306, 310, 314, or 318.
[0184] 141. The nucleic acid of any of embodiments 133-140, wherein the VP1 polypeptide comprises an amino acid sequence with at least 80, 85, 90, 91, 92, 93, 94, 95, 96, 97, 98, 99, or 100% identity to any of SEQ ID NOs: 1, 5, 9, 13, 17, 21, 25, 29, 33, 37, 41, 45, 49, 53, 57, 61, 65, 69, 73, 77, 81, 85, 89, 93, 97, 101, 105, 109, 113, 117, 121, 125, 129, 133, 137, 141, 145, 149, 153, 157, 161, 165, 169, 173, 177, 181, 185, 189, 193, 197, 201, 205, 209, 213, 217, 221, 225, 229, 233, 237, 241, 245, 249, 253, 257, 261, 265, 269, 273, 277, 281, 285, 289, 293, 297, 301, 305, 309, 313, or 317.
[0185] 142. The nucleic acid of any of embodiments 133-141, wherein the VP1 polypeptide comprises an amino acid sequence that, except for the amino acid specified by the exogenous start codon, differs by no more than 20, 19, 18, 17, 16, 15, 14, 13, 12, 11, 10, 9, 8, 7, 6, 5, 4, 3, 2, or 1 amino acids from the sequence of any of SEQ ID NOs: 1, 5, 9, 13, 17, 21, 25, 29, 33, 37, 41, 45, 49, 53, 57, 61, 65, 69, 73, 77, 81, 85, 89, 93, 97, 101, 105, 109, 113, 117, 121, 125, 129, 133, 137, 141, 145, 149, 153, 157, 161, 165, 169, 173, 177, 181, 185, 189, 193, 197, 201, 205, 209, 213, 217, 221, 225, 229, 233, 237, 241, 245, 249, 253, 257, 261, 265, 269, 273, 277, 281, 285, 289, 293, 297, 301, 305, 309, 313, or 317.
[0186] 143a. The nucleic acid of any of embodiments 133-142, wherein the MAAP polypeptide is a dependoparvovirus B (e.g., AAV5) MAAP polypeptide.
[0187] 143b. The nucleic acid of any of embodiments 133-143, wherein the VP1 polypeptide is other than an AAV5 VP1 polypeptide.
[0188] 144. The nucleic acid of any of embodiments 133-143, wherein the VP1 polypeptide is a dependoparvovirus (e.g., dependoparvovirus B, e.g., AAV5) VP1 polypeptide.
[0189] 145. A dependoparvovirus (e.g., dependoparvovirus A or B, e.g., AAV5 or a serotype other than AAV5) particle comprising the nucleic acid of any of embodiments 133-144.
[0190] 146. A VP1 polypeptide encoded by the nucleic acid of any of embodiments 36-108 or 133-144.
[0191] 147. A dependoparvovirus (e.g., dependoparvovirus A or B, e.g., AAV5 or a serotype other than AAV5) particle comprising the VP1 polypeptide of embodiment 146.
[0192] 148. An isolated or purified preparation of the polypeptide of embodiment 146.
[0193] 149. A vector, e.g., a plasmid, comprising the nucleic acid of any of embodiments 133-144.
[0194] 150. A cell comprising the nucleic acid of any of embodiments 133-144.
[0195] 151. A cell-free system comprising the nucleic acid of any of embodiments 133-144.
[0196] 152. A translation system comprising the nucleic acid of any of embodiments 133-144.
[0197] 153. A cell comprising the vector of embodiment 149.
[0198] 154. A cell-free system comprising the vector of embodiment 149.
[0199] 155. A translation system comprising the vector of embodiment 149.
[0200] 156. A cell comprising the AAV particle of embodiment 145 or 147.
[0201] 157. A cell-free system comprising the AAV particle of embodiment 145 or 147.
[0202] 158. A translation system comprising the AAV particle of embodiment 145 or 147.
[0203] 159. A method of delivering a payload to a cell comprising contacting the cell with a viral particle comprising the nucleic acid of any of embodiments 1-108 or 133-144.
[0204] 160. A method of delivering a payload to a subject comprising administering to the subject, a viral particle comprising the VP1 polypeptide of embodiment 146.
[0205] 161. A method of making a dependoparvovirus (e.g., dependoparvovirus A or B, e.g., an adeno-associated dependoparvovirus (AAV), e.g. AAV5 or a serotype other than AAV5) particle, comprising:
   [0206] providing a cell, cell-free system, or other translation system, comprising:
      [0207] a nucleic acid of any of embodiments 1-108; and
   [0208] cultivating the cell, cell-free system, or other translation system, under conditions suitable for the production of the dependoparvovirus particle,
   [0209] thereby making the dependoparvovirus particle.
[0210] 162. The method of embodiment 161, wherein the nucleic acid of 1-108 is disposed in the genome of the dependoparvovirus and is packaged into the dependoparvovirus particle.
[0211] 163. The method of embodiment 161, wherein the cell, cell-free system, or other translation system comprises a second nucleic acid molecule and said second nucleic acid molecule is packaged in the dependoparvovirus particle.
[0212] 164. The method of embodiment 163, wherein the second nucleic acid comprises an exogenous sequence.
[0213] 165. The method of embodiment 163, wherein the exogenous sequence encodes an exogenous polypeptide.
[0214] 166. The method of either of embodiment 164 or 165, wherein the exogenous sequence encodes a therapeutic product.
[0215] 167. The method of any of embodiments 163-166, wherein a nucleic acid of any of embodiments 1-108 mediates the production of a dependoparvovirus particle which does not include said nucleic acid of any of embodiments 1-108.
[0216] 168. A method of making a dependoparvovirus (e.g., dependoparvovirus A or B, e.g., an adeno-associated dependoparvovirus (AAV), e.g. AAV5 or a serotype other than AAV5) particle, comprising:
   [0217] providing a cell, cell-free system, or other translation system, comprising:
      [0218] a MAAP polypeptide of any of embodiments 123-130 or 132; and
   [0219] cultivating the cell, cell-free system, or other translation system, under conditions suitable for the production of the dependoparvovirus particle,
   [0220] thereby making the dependoparvovirus particle.
[0221] 169. A method of making a dependoparvovirus (e.g., dependoparvovirus A or B, e.g., an adeno-associated dependoparvovirus (AAV), e.g. AAV5 or a serotype other than AAV5) particle, comprising:
   [0222] providing a cell, cell-free system, or other translation system, comprising:
      [0223] a VP1 polypeptide of embodiment 146; and
   [0224] cultivating the cell, cell-free system, or other translation system, under conditions suitable for the production of the dependoparvovirus particle,
   [0225] thereby making the dependoparvovirus particle.
[0226] 170. The method of any of embodiments 161-169, wherein the dependoparvovirus particle is a dependoparvovirus A particle.
[0227] 171. The method of any of embodiments 161-169, wherein the dependoparvovirus particle is a dependoparvovirus B particle.
[0228] 172. The method of any of embodiments 161-169, wherein the dependoparvovirus particle is an adeno-associated dependoparvovirus (AAV) particle.
[0229] 173. The method of any of embodiments 161-169, wherein the dependoparvovirus particle is an AAV5 particle.
[0230] 174. The method of any of embodiments 161-169, wherein the dependoparvovirus particle is a particle other than an AAV5 particle.
[0231] 175. A dependoparvovirus (e.g., dependoparvovirus A or B, e.g., an adeno-associated dependoparvovirus (AAV), e.g. AAV5 or a serotype other than AAV5) particle made in a cell, cell-free system, or other translation system, the cell, cell-free system, or other translation system, comprising a nucleic acid encoding a dependoparvovirus B (e.g., AAV5) MAAP ORF comprising an exogenous stop codon or a MAAP polypeptide encoded by the MAAP ORF.
[0232] 176. The dependoparvovirus particle of embodiment 175, wherein the cell, cell-free system, or other translation system, comprising the nucleic acid packages, secretes, and/or produces dependoparvovirus (e.g., dependoparvovirus A or B, e.g., an adeno-associated dependoparvovirus (AAV), e.g. AAV5 or a serotype other than AAV5) particle at a level of at least 50% or more than that of a cell, cell-free system, or other translation system, comprising an otherwise similar nucleic acid that does not comprise the exogenous start codon.
[0233] 177. The particle of embodiment of either embodiment 175 or 176, wherein the particle is made by the method of any of embodiments 161-174.
[0234] 178. The particle of any of embodiments 175-177, further comprising a packaged nucleic acid molecule.
[0235] 179. The particle of any of embodiments 175-178, wherein a nucleic acid of 1-108 is packaged into the dependoparvovirus (e.g., dependoparvovirus A or B, e.g., an adeno-associated dependoparvovirus (AAV), e.g. AAV5 or a serotype other than AAV5) particle.
[0236] 180. The particle of any of embodiments 175-178, wherein a nucleic acid comprising an exogenous sequence is packaged into the dependoparvovirus (e.g., dependoparvovirus A or B, e.g., an adeno-associated dependoparvovirus (AAV), e.g. AAV5 or a serotype other than AAV5) particle.
[0237] 181. The particle of any of embodiment 180, wherein a nucleic acid sequence encoding an exogenous polypeptide is packaged into the dependoparvovirus (e.g., dependoparvovirus A or B, e.g., an adeno-associated dependoparvovirus (AAV), e.g. AAV5 or a serotype other than AAV5) particle.
[0238] 182. The particle of any of embodiment 180-181, wherein the nucleic acid encoding an exogenous polypeptide encodes a therapeutic product.
[0239] 183. The particle of any of embodiments 180-182, wherein the dependoparvovirus particle is a dependoparvovirus B particle.
[0240] 184. The particle of any of embodiments 180-182, wherein the dependoparvovirus particle is a dependoparvovirus A particle.
[0241] 185. The particle of any of embodiments 180-184, wherein the dependoparvovirus particle is an AAV particle.
[0242] 186. The particle of embodiment 185, wherein the dependoparvovirus particle is an AAV5 particle.
[0243] 187. The particle of embodiment 185, wherein the dependoparvovirus particle is a particle other than an AAV5 particle.
[0244] 188. The dependoparvovirus particle of any of embodiments 175-187, wherein the particle comprises:
   [0245] a capsid packaged nucleic acid molecule,
   [0246] a VP1 polypeptide,
   [0247] a VP2 polypeptide, and
   [0248] optionally a VP3 polypeptide.
[0249] 189. The dependoparvovirus particle of embodiment 188, wherein:
   [0250] a) the ratio of VP1 to VP2 or VP3 polypeptide is greater than the ratio in a reference particle, wherein the production of the reference particle was mediated by a wild type MAAP polypeptide (e.g., a MAAP polypeptide encoded by an ORF not comprising an exogenous start codon);
   [0251] b) the ratio of VP1 to either of VP2 or VP3, is altered in a mutant MAAP polypeptide dependent fashion, e.g., in a fashion mediated by a mutant MAAP polypeptide described herein;
   [0252] c) the ratio of VP1 to VP2 is greater than 1.2:1, 1.5:1, or 2:1; or
   [0253] d) the ratio of VP1 to VP3 is greater than 1.2:10, 1.5:10, or 2:1.
[0254] 190. The dependoparvovirus particle of any of embodiments 175-178 or 180-189, wherein the production of the particle was mediated by a MAAP polypeptide encoded by a sequence comprising an exogenous start codon (e.g., a MAAP polypeptide encoded by a nucleic acid of embodiment 1-108), wherein the sequence encoding the MAAP polypeptide comprising the exogenous start codon is not packaged into the particle.
[0255] 191. The particle of either of embodiments 189 or 190, wherein the ratio of VP1, VP2, and VP3 polypeptide in the capsid is 1:1:X, wherein X is less than 8 and may be 0 (e.g., VP3 may not be present in the capsid).
[0256] 192. The particle of any of embodiments 188-191, wherein the nucleic acid used to produce VP3 does not comprise a mutation, e.g., a VP3 mutation, that decreases or abrogates the expression of the VP3 polypeptide (e.g., relative to a reference dependoparvovirus (e.g., dependoparvovirus A or B, e.g., an adeno-associated dependoparvovirus (AAV), e.g. AAV5 or a serotype other than AAV5)).
[0257] 193. The particle of any of embodiments 188-192, wherein the nucleic acid used to produce VP2 does not comprise a mutation, e.g., a VP2 mutation, that decreases or abrogates the expression of the VP2 polypeptide (e.g., relative to a reference dependoparvovirus (e.g., dependoparvovirus A or B, e.g., an adeno-associated dependoparvovirus (AAV), e.g. AAV5 or a serotype other than AAV5)).
[0258] 194. A method of delivering a payload (e.g., a nucleic acid) to a cell comprising contacting the cell with a particle described herein comprising the payload.
[0259] 195. The method of embodiment 194, wherein the particle is a particle of embodiments 147 or 180-193 or a particle made by a method of embodiments 161-174.
[0260] 196. A method of delivering a payload (e.g., a nucleic acid) to a subject comprising administering to the subject a particle described herein comprising the payload.
[0261] 197. The method of embodiment 196, wherein the particle is a particle of embodiments 147 or 180-193, or a particle made by a method of embodiments 161-174.
[0262] 198. The method of any of embodiments 194-197, wherein the particle delivers the payload to a preselected target cell, organ, tissue, or region.
[0263] 199. The method of any of embodiments 194-198, wherein the particle comprises a mutant Cap polypeptide which preferentially targets the payload to a preselected target cell, organ, tissue, or region.
[0264] 200. A method of treating a disease or condition in a subject, comprising administering to the subject a particle described herein in an amount effective to treat the disease or condition.
[0265] 201. The method of embodiment 200, wherein the particle is a particle of embodiments 147 or 180-193, or a particle made by a method of embodiments 161-174.
[0266] 202. The method of either of embodiments 200 or 201, wherein the particle comprises a payload, e.g., a therapeutic product.

### BRIEF DESCRIPTION OF THE DRAWINGS

[0267] FIG. 1, Panels A, B, and C shows three graphs of the dependoparvovirus production efficiency of mutant dependoparvovirus variants relative to wildtype AAV5. Each mutant dependoparvovirus variant comprises an exogenous start codon (ATG) in the VP1 frame (+0) (shown in Panel A), the +1 frame (shown in Panel B), or the +2 frame (shown in Panel C). The x-axis shows the position at which the ATG was introduced. Black dots denote exemplary capsid variants, and gray dots represent all other variants. Gray bars indicate the boundaries of VP1, VP2, VP3, and AAP, and the putative boundaries of MAAP.

[0268] FIG. 2, Panels A and B, shows two graphs of the dependoparvovirus production efficiency of mutant dependoparvovirus variants relative to wildtype AAV5. Each mutant dependoparvovirus variant comprises an exogenous start codon (ATG in Panel A or CTG in Panel B) in the +1 frame. The x-axis shows the position at which the exogenous start codon was introduced. Black dots denote exemplary capsid variants, and gray dots represent all other variants. Gray bars indicate the boundaries of VP1, VP2, VP3, and AAP, and the putative boundaries of MAAP.

### DETAILED DESCRIPTION

[0269] The present disclosure is directed, in part, to the discovery that a cell comprising a mutated open reading frame (ORF) encoding Membrane-Associated Accessory Protein (MAAP) may exhibit an improvement in a production characteristic involved in production of a dependoparvovirus particle. Without wishing to be bound by theory, MAAP is thought to play a role in packaging and/or secretion of dependoparvovirus particles from a host cell. Some dependoparvovirus clades or strains have a genome comprising a MAAP encoding ORF comprising (e.g., at the start of the coding sequence) non-canonical start codons. Other dependoparvovirus clades or strains have a genome comprising a MAAP encoding ORF that does not comprise a canonical or non-canonical start codon (e.g., proximal to the start of the coding sequence). In some embodiments, a MAAP encoding ORF comprising a non-canonical start codon or not comprising a non-canonical or canonical start codon (e.g., proximal to the start of the coding sequence) does not appreciably express (e.g., does not express) in a cell. Without wishing to be bound by theory, it is thought that the presence of an exogenous start codon in the ORF encoding MAAP may increase expression of MAAP, e.g., relative to an otherwise similar ORF not comprising the exogenous start codon. Without wishing to be bound by theory, it is thought that the presence of an exogenous start codon, e.g., that more strongly promotes translation initiation than the codon endogenously present, may increase expression of MAAP, e.g., relative to an otherwise similar ORF not comprising the exogenous start codon. Such an improved ORF encoding MAAP may be useful to improve production of dependoparvovirus particles by cells, cell free systems, or translation systems comprising said ORF.

### Definitions

[0270] A, An, The: As used herein, the singular forms “a,” “an” and “the” include plural referents unless the context clearly dictates otherwise.

[0271] About, Approximately: As used herein, the terms “about” and “approximately” shall generally mean an acceptable degree of error for the quantity measured given the nature or precision of the measurements. Exemplary degrees of error are within 15 percent (%), typically, within 10%, and more typically, within 5% of a given value or range of values.

[0272] Dependoparvovirus capsid: As used herein, the term “dependoparvovirus capsid” refers to an assembled viral capsid comprising dependoparvovirus polypeptides. In some embodiments, a dependoparvovirus capsid is a functional dependoparvovirus capsid, e.g., is fully folded and/or assembled, is competent to infect a target cell, or remains stable (e.g., folded/assembled and/or competent to infect a target cell) for at least a threshold time.

[0273] Dependoparvovirus particle: As used herein, the term “dependoparvovirus particle” refers to an assembled viral capsid comprising dependoparvovirus polypeptides and a packaged nucleic acid, e.g., comprising a payload, one or more components of a dependoparvovirus genome (e.g., a whole dependoparvovirus genome), or both. In some embodiments, a dependoparvovirus particle is a functional dependoparvovirus particle, e.g., comprises a desired payload, is fully folded and/or assembled, is competent to infect a target cell, or remains stable (e.g., folded/assembled and/or competent to infect a target cell) for at least a threshold time.

[0274] Dependoparvovirus X particle/capsid: As used herein, the term “dependoparvovirus X particle/capsid” refers to a dependoparvovirus particle/capsid comprising at least one polypeptide or polypeptide encoding nucleic acid sequence derived from a naturally occurring dependoparvovirus X species. For example, a dependoparvovirus B particle refers to a dependoparvovirus particle comprising at least one polypeptide or polypeptide encoding nucleic acid sequence derived from a naturally occurring dependoparvovirus B sequence. Derived from, as used in this context, means having at least 80, 85, 90, 91, 92, 93, 94, 95, 96, 97, 98, 99, or 100% identity to the sequence in question. Correspondingly, an AAVX particle/capsid, as used herein, refers to an AAV particle/caspid comprising at least one polypeptide or polypeptide encoding nucleic acid sequence derived from a naturally occurring AAV X serotype. For example, an AAV5 particle refers to an AAV particle comprising at least one polypeptide or polypeptide encoding nucleic acid sequence derived from a naturally occurring AAV5 sequence.

[0275] Exogenous: As used herein, the term “exogenous” refers to a feature, sequence, or component present in a circumstance (e.g., in a nucleic acid, polypeptide, or cell) that does not naturally occur in said circumstance. For example, a nucleic acid sequence comprising an ORF encoding a polypeptide may comprise an exogenous start codon. Use of the term exogenous in this fashion means that an ORF encoding a polypeptide comprising the start codon in question at this position does not occur naturally, e.g., is not present in AAV2, AAV5, or AAV9, e.g., is not present in SEQ ID NO: 331. In some embodiments, the exogenous start codon may replace an endogenous start codon. In some embodiments, the exogenous start codon may replace a codon that is not recognized as a start codon by the host cell. A person of skill will readily understand that a sequence (e.g., a start codon) may be exogenous when provided in a first ORF (e.g., that does not naturally comprise a start codon at the site in question) but may not be exogenous in a second ORF (e.g., that does naturally comprise that particular start codon at the site in question).

[0276] Functional: As used herein in reference to a dependoparvovirus MAAP polypeptide, the term “functional” refers to a dependoparvovirus MAAP polypeptide that either: increases the packaging and/or secretion of dependoparvovirus particles when present in a host cell (e.g., relative to an otherwise similar host cell lacking the MAAP polypeptide), or provides at least 50, 60, 70, 80, 90, or 100% of the activity (e.g., packaging and/or secretion promoting activity) of a naturally occurring MAAP polypeptide, e.g., when measured in an otherwise similar cell or system. As used herein in reference to an ORF, the term “functional” means that the ORF mediates translation initiation in a cell, e.g., a human cell, cell-free system, or other translation system (e.g., detectable translation initiation). As used herein in reference to a polypeptide component of a dependoparvovirus capsid (e.g., Cap (e.g., VP1, VP2, and/or VP3) or Rep), the term “functional” refers to a polypeptide which provides at least 50, 60, 70, 80, 90, or 100% of the activity of a naturally occurring version of that polypeptide component (e.g., when present in a host cell). For example, a functional VP1 polypeptide may stably fold and assemble into a dependoparvovirus capsid (e.g., that is competent for packaging and/or secretion). As used herein in reference to a dependoparvovirus capsid or particle, “functional” refers to a capsid or particle comprising one or more of the following production characteristics: comprises a desired payload, is fully folded and/or assembled, is competent to infect a target cell, or remains stable (e.g., folded/assembled and/or competent to infect a target cell) for at least a threshold time.

[0277] MAAP Polypeptide: As used herein, a “MAAP polypeptide” refers to: a naturally occurring dependoparvovirus membrane associated accessory polypeptide (MAAP); a mutant, artificial, or synthetic MAAP known in the art; or a polypeptide comprising an amino acid sequence with at least 70, 75, 80, 85, 90, 95, 96, 97, 98, or 99% identity to the aforementioned. In some embodiments, a MAAP polypeptide is a functional MAAP polypeptide. In some embodiments, an ORF encoding a MAAP polypeptide comprises an exogenous start codon. In some embodiments, a MAAP polypeptide is a full length MAAP polypeptide (e.g., comprising all the regions and/or domains corresponding to a naturally occurring dependoparvovirus MAAP). In some embodiments, a MAAP polypeptide comprises a truncation or a deletion (e.g., relative to a naturally occurring MAAP). In some embodiments, a MAAP polypeptide comprises one, two, three, four, five, or all of (e.g., from most N-terminal to most C-terminal): an N-terminal disordered region, optionally capable of binding to a polypeptide; a short hydrophobic region comprising a beta-strand, optionally capable of binding to a polypeptide; a T/S rich disordered region, optionally enriched in charged amino acids; a region devoid of predicted secondary structure, optionally capable of binding to a polypeptide; a disordered region, optionally capable of forming an alpha-helix; or a C-terminal amphipathic region comprising an alpha-helix, optionally capable of binding a membrane. In some embodiments, a MAAP polypeptide comprises one or more amino acids in addition to those present in a naturally occurring MAAP polypeptide. In some embodiments, such additional amino acids are at the N-terminal end of the MAAP polypeptide, e.g., as a consequence of the presence of an exogenous start codon upstream of an endogenous or putative start codon in the ORF encoding MAAP. In some embodiments, the amino acid encoded by the exogenous start codon is an additional amino acid.

[0278] Nucleic acid: As used herein, in its broadest sense, the term “nucleic acid” refers to any compound and/or substance that is or can be incorporated into an oligonucleotide chain. In some embodiments, a nucleic acid is a compound and/or substance that is or can be incorporated into an oligonucleotide chain via a phosphodiester linkage. As will be clear from context, in some embodiments, “nucleic acid” refers to an individual nucleic acid monomer (e.g., a nucleotide and/or nucleoside); in some embodiments, “nucleic acid” refers to an oligonucleotide chain comprising individual nucleic acid monomers or a longer polynucleotide chain comprising many individual nucleic acid monomers. In some embodiments, a “nucleic acid” is or comprises RNA; in some embodiments, a “nucleic acid” is or comprises DNA. In some embodiments, a nucleic acid is, comprises, or consists of one or more natural nucleic acid residues. In some embodiments, a nucleic acid is, comprises, or consists of one or more nucleic acid analogs. In some embodiments, a nucleic acid is, comprises, or consists of one or more modified, synthetic, or non-naturally occurring nucleotides. In some embodiments, a nucleic acid analog differs from a nucleic acid in that it does not utilize a phosphodiester backbone. For example, in some embodiments, a nucleic acid is, comprises, or consists of one or more “peptide nucleic acids”, which are known in the art and have peptide bonds instead of phosphodiester bonds in the backbone, are considered within the scope of the present invention. Alternatively or additionally, in some embodiments, a nucleic acid has one or more phosphorothioate and/or 5′-N-phosphoramidite linkages rather than phosphodiester bonds. In some embodiments, a nucleic acid has a nucleotide sequence that encodes a functional gene product such as an RNA or protein. In some embodiments, a nucleic acid is partly or wholly single stranded; in some embodiments, a nucleic acid is partly or wholly double stranded.

[0279] Production characteristic: As used herein, the term “production characteristic” refers to a characteristic of a dependoparvovirus production process that is alterable by changing the characteristics of a nucleic acid, polypeptide, or dependoparvovirus particle described herein. Production characteristics include, but are not limited to: the amount of a dependoparvovirus polypeptide or particle produced intracellularly, the amount of correctly folded dependoparvovirus polypeptide, the amount of correctly packaged dependoparvovirus capsid or particle, the amount of dependoparvovirus particle secreted from the cell, the overall amount of dependoparvovirus particle produced, or any preceding characteristic relative to a unit of time or resource expended, or any preceding characteristic relative to an otherwise similar cell (e.g., comprising an ORF encoding MAAP not comprising the exogenous start codon). In some embodiments, changes (e.g., improvements) in a production characteristic are host cell or dependoparvovirus clade or strain dependent. For example, a dependoparvovirus production process may comprise providing a host cell comprising a nucleic acid encoding the components of a dependoparvovirus particle. In some embodiments, the dependoparvovirus production process may comprise providing the host cell with a nucleic acid comprising a sequence encoding an ORF encoding a functional dependoparvovirus B MAAP which ORF comprises an exogenous start codon. Providing the nucleic acid comprising a sequence encoding the ORF may improve one or more production characteristics.

[0280] Start codon: As used herein, the term “start codon” refers to any codon recognized by a host cell as a site to initiate translation (e.g., a site that mediates detectable translation initiation). Without wishing to be bound by theory, start codons vary in strength, with strong start codons more strongly promoting translation initiation and weak start codons less strongly promoting translation initiation. The canonical start codon is ATG, which encodes the amino acid methionine, but a number of non-canonical start codons are also recognized by host cells.

### Nucleic Acids Comprising ORFs Encoding MAAP Polypeptide

[0281] The disclosure is directed, in part, to a nucleic acid comprising a sequence encoding an open reading frame (ORF) for a functional MAAP polypeptide comprising an exogenous start codon. Without wishing to be bound by theory, it is thought that a cell, cell-free system, or translation system (e.g., for producing a dependoparvovirus particle) comprising a nucleic acid encoding an ORF encoding a functional MAAP polypeptide comprising an exogenous start codon may exhibit one or more improved production characteristics.

[0282] In some embodiments, the exogenous start codon is a canonical start codon, e.g., ATG. In some embodiments, the exogenous start codon is a non-canonical start codon. In some embodiments, the exogenous start codon is selected from CTG, GTG, ACG, TTG, ATT, ATC, ATA, or AGG, e.g., CTG. Without wishing to be bound by theory, a naturally occurring ORF encoding MAAP may comprise a non-canonical start codon or in some cases lack a detectable start codon in the expected position near the beginning of the MAAP encoding sequence. The disclosure is based, in part, on the discovery that introducing an exogenous start codon to the ORF encoding MAAP may improve one or more production characteristics relating to the production of a dependoparvovirus.

[0283] In some embodiments, the exogenous start codon is positioned at the beginning of the MAAP polypeptide encoding sequence (e.g., the exogenous start codon replaces an endogenous first codon of the MAAP polypeptide encoding sequence). In some embodiments, the exogenous start codon is positioned at a point within the MAAP polypeptide encoding sequence. In such embodiments, the exogenous start codon may become the first codon of a truncated MAAP polypeptide (e.g., that is missing amino acids N-terminal of the exogenous start codon). In some embodiments, the exogenous start codon is positioned outside of the MAAP polypeptide encoding sequence (e.g., in sequence N-terminal of the endogenous start codon or the position corresponding to an endogenous start codon). In such embodiments, the exogenous start codon may become the first codon of an expanded MAAP polypeptide (e.g., that includes additional amino acids N-terminal of the endogenous coding sequence). Without wishing to be bound by theory, it is thought that some naturally occurring ORFs encoding MAAP polypeptide comprise a weak, non-canonical start codon or no observable start codon near the beginning of the MAAP polypeptide encoding sequence or at a position where a start codon exists in another species or serotype. As such, additional amino acids N-terminal of those encoded by an endogenous coding sequence can refer to amino acids encoded upstream of a putative start codon but that are included in the MAAP polypeptide of another species' or serotype's MAAP polypeptide because that species' or serotype's MAAP ORF has a start codon further upstream.

[0284] By introducing an exogenous start codon, the level of MAAP translation initiation may be increased. Without wishing to be bound by theory, truncation or expansion of the MAAP polypeptide amino acid sequence (e.g., by introducing an exogenous start codon at some distance N- or C-terminal of the endogenous start codon) may be less important to one or more production characteristics associated with producing a dependoparvovirus particle than increasing the level of MAAP polypeptide (albeit truncated or expanded) in the host cell.

[0285] Without wishing to be bound by theory, the ORF encoding wildtype AAV2 MAAP polypeptide comprises a CTG start codon. Some other ORFs encoding MAAP polypeptide, e.g., AAV5 MAAP polypeptide, do not appear to comprise a start codon at the position corresponding to the CTG start codon of AAV2 MAAP, instead having one or more candidate start codons downstream. CIGAR strings given in Table 1, which specify positions of difference between mutant MAAP encoding nucleic acid sequences and wildtype MAAP nucleic acid sequences, are given relative to the nucleic acid sequence encoding AAV5 MAAP which begins at the site of the AAV2 MAAP start codon (SEQ ID NO: 331). A person of skill will understand that a position with a given number in the genome of one dependoparvovirus species or serotype may have a different, readily ascertainable number at the corresponding position in the genome of a different dependoparvovirus species or serotype.

[0286] In some embodiments, a CTG start codon encodes a leucine amino acid. In other embodiments, a CTG start codon may be decoded by cell, cell-free system, or other translation system as encoding a methionine. Without wishing to be bound by theory, it is thought that cells and translation systems recognizing alternate, non-ATG start codons may produce polypeptides from transcripts comprising non-ATG start codons where the first amino acid is nonetheless methionine. Without wishing to be bound by theory, it is possible that the cell or translation system decodes the non-ATG start codon (e.g., CTG) as methionine, e.g., via an alternative tRNA or promiscuous binding of a Met-tRNA, or that the non-ATG start codon encoded amino acid is edited or substituted for methionine by some other process (see, e.g., Kearse, M, and Wilusz, J. Genes & Dev. 2017. 31: 1717-1731). In some embodiments, an ORF encoding MAAP polypeptide comprises an exogenous start codon comprising CTG, wherein the first amino acid of the MAAP polypeptide is methionine. In some embodiments, an ORF encoding MAAP polypeptide comprises an exogenous start codon comprising CTG, wherein the first amino acid of the MAAP polypeptide is leucine.

[0287] In some embodiments, the exogenous start codon is introduced at any of the positions listed in columns 4 or 5 of Table 1 in a nucleic acid comprising an ORF encoding MAAP, or at a corresponding position in a nucleic acid comprising an ORF encoding MAAP from another dependoparvovirus. A person of skill will understand that in some cases a plurality of mutations may introduce an exogenous start codon at a position listed in columns 4 or 5 of Table 1, e.g., a mutation at the nucleotide of said position or in a nearby (e.g., adjacent) nucleotide. In some embodiments, the exogenous start codon is at a position listed in column 4 or 5 of Table 1 in a nucleic acid comprising an ORF encoding MAAP, or at a corresponding position in a nucleic acid comprising an ORF encoding MAAP from another dependoparvovirus.

[0288] In some embodiments, a nucleic acid comprising a sequence encoding an ORF for a functional MAAP polypeptide comprises an alteration relative to a reference sequence that creates an exogenous start codon. In some embodiments, the reference sequence is a naturally occurring dependoparvovirus MAAP. In some embodiments, the reference sequence is a mutant, artificial, or synthetic MAAP known in the art. In some embodiments, the reference sequence comprises a wildtype sequence, e.g., SEQ ID NO: 331, or a sequence with at least 90, 91, 92, 93, 94, 95, 96, 97, 98, or 99% sequence identity with a wildtype sequence, e.g., SEQ ID NO: 331. In some embodiments, the alteration comprises substitution, deletion, or insertion of one or more nucleotides, or a combination of a substitution, deletion, or insertion. In some embodiments, a nucleic acid comprising a sequence encoding an ORF for a functional MAAP polypeptide comprises an alteration at any of the positions listed in columns 4 or 5 of Table 1, or a nearby, e.g., adjacent, position, relative to the AAV5 genome or at a corresponding position in another dependoparvovirus genome, that creates an exogenous start codon.

[0289] In some embodiments, the sequence encoding an ORF for a functional MAAP polypeptide has at least 80, 85, 90, 91, 92, 93, 94, 95, 96, 97, 98, 99, or 100% identity to a reference sequence. In some embodiments, the sequence encoding an ORF for a functional MAAP polypeptide has at least 80, 85, 90, 91, 92, 93, 94, 95, 96, 97, 98, 99, or 100% identity to a wildtype dependoparvovirus B MAAP gene. In some embodiments, the sequence encoding an ORF for a functional MAAP polypeptide has at least 80, 85, 90, 91, 92, 93, 94, 95, 96, 97, 98, 99, or 100% identity to a wildtype AAV5 MAAP gene, e.g., SEQ ID NO: 331. In some embodiments, the sequence encoding an ORF for a functional MAAP polypeptide is identical to a wildtype dependoparvovirus B (e.g., AAV5) MAAP encoding sequence except for the exogenous start codon. In some embodiments, the ORF for a functional MAAP polypeptide differs by no more than 30, 29, 28, 27, 26, 25, 24, 23, 22, 21, 20, 19, 18, 17, 16, 15, 14, 13, 12, 11, 10, 9, 8, 7, 6, 5, 4, 3, 2, or 1 nucleotides from the nucleotide sequence of a wildtype ORF encoding a wildtype MAAP polypeptide (e.g., from a nucleotide sequence of SEQ ID NO: 331). In some embodiments, the ORF for a functional MAAP polypeptide differs by 1-30, 5-30, 10-30, 15-30, 20-30, 25-30, 1-25, 5-25, 10-25, 15-25, 20-25, 1-20, 5-20, 10-20, 15-20, 1-15, 5-15, 10-15, 1-10, 5-10, or 1-5 nucleotides from the nucleotide sequence of a wildtype ORF encoding a wildtype MAAP polypeptide (e.g., from a nucleotide sequence of SEQ ID NO: 331).

[0290] In some embodiments, the nucleic acid sequence comprising an ORF encoding a MAAP polypeptide is wildtype (e.g., a wildtype dependoparvovirus B, e.g., an AAV5, sequence encoding MAAP polypeptide) at all other positions besides those affected by the exogenous start codon. In some embodiments, the nucleic acid sequence comprising an ORF encoding a MAAP polypeptide is wildtype (e.g., a wildtype dependoparvovirus B, e.g., an AAV5, sequence encoding MAAP polypeptide) at all other positions besides those affected by the exogenous start codon and a position that is altered (relative to a wildtype sequence, e.g., SEQ ID NO: 331) in any of SEQ ID NOs: 4, 8, 12, 16, 20, 24, 28, 32, 36, 40, 44, 48, 52, 56, 60, 64, 68, 72, 76, 80, 84, 88, 92, 96, 100, 104, 108, 112, 116, 120, 124, 128, 132, 136, 140, 144, 148, 152, 156, 160, 164, 168, 172, 176, 180, 184, 188, 192, 196, 200, 204, 208, 212, 216, 220, 224, 228, 232, 236, 240, 244, 248, 252, 256, 260, 264, 268, 272, 276, 280, 284, 288, 292, 296, 300, 304, 308, 312, 316, or 320.

[0291] In some embodiments, the ORF for a functional dependoparvovirus (e.g., dependoparvovirus B, e.g., AAV5) MAAP polypeptide is a functional ORF. In some embodiments, the ORF for a functional dependoparvovirus (e.g., dependoparvovirus B, e.g., AAV5) MAAP polypeptide mediates detectable translation initiation in a cell, e.g., a human cell, cell-free system, or other translation system. In some embodiments, the ORF for a functional dependoparvovirus (e.g., dependoparvovirus B, e.g., AAV5) MAAP polypeptide allows for the production of dependoparvovirus particles when present in a cell, cell-free system, or other translation system, otherwise competent for producing dependoparvovirus particles.

[0292] In some embodiments, a nucleic acid comprising a sequence encoding an ORF for a functional MAAP polypeptide comprises an additional alteration relative to the reference sequence (i.e., in addition to an alteration that creates an exogenous start codon). In some embodiments, the additional alteration comprises substitution, deletion, or insertion of one or more nucleotides. In some embodiments, the additional alteration improves one or more production characteristics, e.g., of a dependoparvovirus particle or method of producing the same in a host cell.

[0293] Table 1 lists information regarding exemplary variant dependoparvovirus particles comprising nucleic acids comprising an ORF encoding a MAAP polypeptide comprising an exogenous start codon and the production characteristics of said exemplary variants. In addition, Table 1 lists information regarding the position of the exogenous start codon in a given exemplary variant (position numbers are given based on the VP1 encoding sequence of AAV5), changes to the VP1 polypeptide (if any) in the form of edit distance from AAV5 VP1 sequence, CIGAR notation of sequence alterations (relative to wildtype AAV5) for the VP1 polypeptide and MAAP polypeptide sequences of the variant, and SEQ ID NOs corresponding to the nucleic acid and amino acid sequences of the VP1 and MAAP of the variant (see Table 2). Exemplary sequences of nucleic acids encoding an ORF encoding a functional MAAP polypeptide comprising an exogenous start codon, as well as corresponding MAAP polypeptide sequences, are provided in Table 2 below. Exemplary sequences of nucleic acids encoding VP1 polypeptides, as well as corresponding VP1 polypeptide amino acid sequences, are also provided in Table 2 below.

TABLE 1

| | Column 2 | | Column | Column | Column 6 | | |
|---|---|---|---|---|---|---|---|
| | log2 | Column | 4 | 5 | SEQ ID | | |
| | (production | 3 | New | New | NOS | | |
| | efficiency | VP1 AA | MAAP | MAAP | associated | | |
| Column 1 | relative | edit | ATG | CTG | with | Column 7 | Column 8 |
| Variant | to | distance | nucleotide | nucleotide | Variant | VP1 | MAAP |
| No. | AAV5) | to AAV5 | position(s) | position(s) | No. | CIGAR | CIGAR |
| 1 | 9.63 | 1 | 74 | | 1, 2, 3, 4 | 24 = 1X700 = | 1I119 = |
| 2 | 9.07 | 2 | 74 | | 5, 6, 7, 8 | 24 = 1X5 = | 1I4 = 2X113= |
| | | | | | | 1X694= | |
| 3 | 8.68 | 5 | 122 | 143 | 9, 10, 11, | 38 = 1I2X9 = | 14D1X9 = |
| | | | | | 12 | 1X11 = | 1X10 = |
| | | | | | | 1X663= | 2X82= |
| 4 | 8.16 | 1 | 47 | | 13, 14, 15, | 15 = 1X709= | 10I119= |
| | | | | | 16 | | |
| 5 | 7.85 | 1 | 56 | | 17, 18, 19, | 18 = 1X706= | 7I119 = |
| | | | | | 20 | | |
| 6 | 7.74 | 1 | 44 | | 21, 22, 23, | 14 = 1X710= | 11I119 = |
| | | | | | 24 | | |
| 7 | 7.67 | 3 | 116 | 143, 191 | 25, 26, 27, | 37 = 1X1 = 112 | 12D2X26 = 1 |
| | | | | | 28 | 6 = 1X659= | X78= |
| 8 | 7.60 | 3 | 65 | | 29, 30, 31, | 18 = 1X2 = 1X | 412 = 1X116= |
| | | | | | 32 | 5 = 1X697= | |
| 9 | 7.58 | 1 | 248 | | 33, 34, 35, | 82 = 1X642= | 57D1X61= |
| | | | | | 36 | | |
| 10 | 7.46 | 6 | 119 | | 37, 38, 39, | 39 = 2X8 = | 14D2X8 = 1X4 = |
| | | | | | 40 | 1X4 = 1X4 = | 1X4 = 1X5 = |
| | | | | | | 1X5 = 1X659= | 1X78= |
| 11 | 7.43 | 1 | 101 | | 41, 42, 43, | 34 = 1I691 = | 7D2X110= |
| | | | | | 44 | | |
| 12 | 7.38 | 2 | 47 | | 45, 46, 47, | 15 = 1X3 = | 10I119= |
| | | | | | 48 | 1X705= | |
| 13 | 7.33 | 1 | 35 | | 49, 50, 51, | 11 = 1X713= | 14I119= |
| | | | | | 52 | | |
| 14 | 7.29 | 1 | 119 | | 53, 54, 55, | 39 = 1X685= | 14D1X104= |
| | | | | | 56 | | |
| 15 | 7.26 | 2 | 146 | | 57, 58, 59, | 49 = 1X4 = | 23D2X4 = |
| | | | | | 60 | 1X670= | 1X89= |
| 16 | 7.03 | 1 | 248 | | 61, 62, 63, | 82 = 1X642= | 57D1X61= |
| | | | | | 64 | | |
| 17 | 6.96 | 1 | 146 | | 65, 66, 67, | 49 = 1X675= | 23D2X94= |
| | | | | | 68 | | |
| 18 | 6.96 | 2 | 119 | | 69, 70, 71, | 39 = 1X18 = | 14D1X18 = |
| | | | | | 72 | 1X666= | 1X85= |
| 19 | 6.89 | 6 | | 77 | 73, 74, 75, | 1 = 1X19 = | 1X1 = 1X116= |
| | | | | | 76 | 2X1 = 2X1 = | |
| | | | | | | 1X697= | |
| 20 | 6.76 | 1 | 248 | | 77, 78, 79, | 82 = 1X642= | 57D1X61= |
| | | | | | 80 | | |
| 21 | 6.74 | 4 | 38, 104 | | 81, 82, 83, | 12 = 1I8 = | 8D1X110= |
| | | | | | 84 | 1X1 = 1X11 = | |
| | | | | | | 1X690= | |
| 22 | 6.42 | 2 | 47 | | 85, 86, 87, | 15 = 1X17 = | 1018 = 1X110= |
| | | | | | 88 | 1X691= | |
| 23 | 6.41 | 2 | 35 | | 89, 90, 91, | 11 = 1X12 = | 14I119= |
| | | | | | 92 | 1X700= | |
| 24 | 6.08 | 1 | 113 | | 93, 94, 95, | 37 = 1X687= | 12D1X106= |
| | | | | | 96 | | |
| 25 | 6.06 | 4 | 248 | | 97, 98, 99, | 65 = 1X2 = 2X | 57D1X61= |
| | | | | | 100 | 12 = 1X642= | |
| 26 | 5.94 | 3 | 101 | | 101, 102, | 34 = 1X2 = 1X | 8D1X3 = |
| | | | | | 103, 104 | 16 = 1X670= | 1X16 = 1X89= |
| 27 | 5.82 | 4 | 248 | | 105, 106, | 65 = 1X2 = | 57D1X61= |
| | | | | | 107, 108 | 1X2 = 1X10 = | |
| | | | | | | 1X642= | |
| 28 | 5.75 | 3 | 119 | 197 | 109, 110, | 39 = 1X9 = | 14D1X9 = |
| | | | | | 111, 112 | 1X15 = 1X659= | 1X15 = 1X78= |
| 29 | 5.73 | 1 | 236 | | 113, 114, | 78 = 1X646= | 53D1X65= |
| | | | | | 115, 116 | | |
| 30 | 5.62 | 1 | 176 | | 117, 118, | 59 = 1X665= | 33D2X84= |
| | | | | | 119, 120 | | |
| 31 | 5.62 | 1 | 146 | | 121, 122, | 49 = 1X675= | 23D2X94= |
| | | | | | 123, 124 | | |
| 32 | 5.55 | 5 | 101 | | 125, 126, | 12 = 2X8 = | 8D3X108= |
| | | | | | 127, 128 | 1X11 = 2X689= | |
| 33 | 5.24 | 4 | 248 | | 129, 130, | 65 = 1X3 = | 57D1X61= |
| | | | | | 131, 132 | 1X9 = 1X2 = | |
| | | | | | | 1X642= | |
| 34 | 5.15 | 1 | 197 | | 133, 134, | 65 = 1X659= | 40D1X78= |
| | | | | | 135, 136 | | |
| 35 | 5.02 | 4 | 248 | | 137, 138, | 69 = 1X5 = | 57D1X61= |
| | | | | | 139, 140 | 2X5 = 1X642= | |
| 36 | 4.94 | 1 | 101 | | 141, 142, | 34 = 1I691= | 7D2X110= |
| | | | | | 143, 144 | | |
| 37 | 4.93 | 6 | 110 | 137 | 145, 146, | 34 = 2X1 = | 12D1X1 = |
| | | | | | 147, 148 | 1D2 = 1X4 = | 2X4 = 1X3 = |
| | | | | | | 1X3 = 1X675= | 1X94= |
| 38 | 4.93 | 1 | 68 | | 149, 150, | 22 = 1I703= | 4I119= |
| | | | | | 151, 152 | | |
| 39 | 4.76 | 2 | 74 | | 153, 154, | 24 = 1X6 = | 116 = 1X112= |
| | | | | | 155, 156 | 1X693= | |
| 40 | 4.66 | 5 | 248 | | 157, 158, | 75 = 2X1 = | 57D1X61= |
| | | | | | 159, 160 | 2X2 = 1X642= | |
| 41 | 4.57 | 1 | 254 | | 161, 162, | 84 = 1I641= | 58D1X60= |
| | | | | | 163, 164 | | |
| 42 | 4.53 | 1 | 146 | | 165, 166, | 49 = 1X675= | 23D2X94= |
| | | | | | 167, 168 | | |
| 43 | 4.42 | 1 | 74 | | 169, 170, | 24 = 1I701= | 2I119= |
| | | | | | 171, 172 | | |
| 44 | 4.41 | 2 | 101 | | 173, 174, | 34 = 1X4 = | 8D1X5 = |
| | | | | | 175, 176 | 1X685= | 1X104= |
| 45 | 4.17 | 1 | 101 | | 177, 178, | 34 = 1X690= | 8D2X109= |
| | | | | | 179, 180 | | |
| 46 | 4.14 | 3 | 146 | | 181, 182, | 33 = 1X3 = | 23D2X94= |
| | | | | | 183, 184 | 1X11 = 1X675= | |
| 47 | 4.07 | 8 | | 125, 149 | 185, 186, | 36 = 3I1 = | 1X1 = 13D1X8 = |
| | | | | | 187, 188 | 4X8 = 1X675= | 1X94= |
| 48 | 4.05 | 1 | 101 | | 189, 190, | 34 = 1X690= | 8D2X109= |
| | | | | | 191, 192 | | |
| 49 | 3.93 | 2 | 236 | | 193, 194, | 75 = 1X2 = | 53D1X65= |
| | | | | | 195, 196 | 1X646= | |
| 50 | 3.87 | 1 | 65 | | 197, 198, | 21 = 1X703= | 4I119= |
| | | | | | 199, 200 | | |
| 51 | 3.85 | 7 | | 77, 101 | 201, 202, | 12 = 2X7 = | 1X7 = 1X110= |
| | | | | | 203, 204 | 1X2 = 2X7 = | |
| | | | | | | 2X690= | |
| 52 | 3.84 | 1 | 110 | | 205, 206, | 37 = 1X687= | 11D2X106= |
| | | | | | 207, 208 | | |
| 53 | 3.79 | 1 | 14 | | 209, 210, | 5 = 1X719= | 21I119= |
| | | | | | 211, 212 | | |
| 54 | 3.75 | 9 | 116 | | 213, 214, | 33 = 1X1 = | 13D3X8 = |
| | | | | | 215, 216 | 1X1 = 1X1 = | 1X4 = 1X4 = |
| | | | | | | 2X8 = 1X4 = | 1X5 = 1X78= |
| | | | | | | 1X4 = 1X5 = | |
| | | | | | | 1X659= | |
| 55 | 3.71 | 2 | 110 | 137, 185 | 217, 218, | 37 = 1D27 = | 12D1X27 = |
| | | | | | 219, 220 | 1X659= | 1X78= |
| 56 | 3.70 | 1 | 110 | | 221, 222, | 37 = 1X687= | 11D2X106= |
| | | | | | 223, 224 | | |
| 57 | 3.49 | 4 | 116 | 137 | 225, 226, | 36 = 1X2 = | 14D1X9 = |
| | | | | | 227, 228 | 1D9 = 1X4 = | 1X4 = 1X89= |
| | | | | | | 1X670= | |
| 58 | 3.37 | 1 | 110 | | 229, 230, | 37 = 1I688= | 10D2X107= |
| | | | | | 231, 232 | | |
| 59 | 3.22 | 3 | 101 | | 233, 234, | 34 = 1X14 = | 8D2X14 = |
| | | | | | 235, 236 | 1X4 = 1X670= | 1X4 = 1X89= |
| 60 | 3.21 | 5 | 236 | | 237, 238, | 68 = 1X6 = | 53D1X3 = |
| | | | | | 239, 240 | 2X1 = 1X3 = | 1X61 = |
| | | | | | | 1X642= | |
| 61 | 3.18 | 1 | 110 | | 241, 242, | 37 = 1X687= | 11D2X106= |
| | | | | | 243, 244 | | |
| 62 | 3.17 | 1 | | 77 | 245, 246, | 25 = 1X699= | 1X118= |
| | | | | | 247, 248 | | |
| 63 | 3.15 | 1 | 236 | | 249, 250, | 78 = 1X646= | 53D1X65 = |
| | | | | | 251, 252 | | |
| 64 | 3.14 | 3 | 116 | 146 | 253, 254, | 38 = 2I16 = | 11D2X16 = |
| | | | | | 255, 256 | 1X670= | 1X89= |
| 65 | 3.09 | 1 | 35 | | 257, 258, | 11 = 1I714= | 15I119= |
| | | | | | 259, 260 | | |
| 66 | 2.95 | 4 | 116 | | 261, 262, | 33 = 2X2 = | 13D2X104= |
| | | | | | 263, 264 | 1X1 = 1X685= | |
| 67 | 2.84 | 10 | 116 | 101 | 265, 266, | 33 = 3X1 = | 13D3X8 = |
| | | | | | 267, 268 | 1X1 = 2X8 = | 1X4 = 1X4 = |
| | | | | | | 1X4 = 1X4 = | 1X5 = 1X78= |
| | | | | | | 1X5 = 1X659= | |
| 68 | 2.80 | 10 | | 113, 125, | 269, 270, | 33 = 1X2 = | 9D6X16 = |
| | | | | 149, 197 | 271, 272 | 314X16 = | 1X8 = |
| | | | | | | 1X8 = 1X659= | 1X78= |
| 69 | 2.80 | 1 | 101 | | 273, 274, | 34 = 1X690= | 8D2X109= |
| | | | | | 275, 276 | | |
| 70 | 2.78 | 1 | | 74 | 277, 278, | 24 = 1X700= | 1I119= |
| | | | | | 279, 280 | | |
| 71 | 2.72 | 3 | 146 | | 281, 282, | 49 = 1X8 = | 23D2X8 = |
| | | | | | 283, 284 | 1X2 = 1X663= | 1X2 = 1X82= |
| 72 | 2.68 | 7 | 116 | | 285, 286, | 33 = 2X2 = | 13D2X14 = |
| | | | | | 287, 288 | 1X1 = 1X14 = | 1X4 = 1X5 = |
| | | | | | | 1X4 = 1X5 = | 1X78= |
| | | | | | | 1X659= | |
| 73 | 2.65 | 5 | 116, 119 | | 289, 290, | 33 = 2X2 = | 13D2X9 = |
| | | | | | 291, 292 | 1X1 = 1X9 = | 1X94= |
| | | | | | | 1X675= | |
| 74 | 2.47 | 3 | 116, 119 | | 293, 294, | 39 = 1X14 = | 13D2X14 = |
| | | | | | 295, 296 | 1X10 = | 1X10 = 1X78= |
| | | | | | | 1X659= | |
| 75 | 2.45 | 5 | 116, 119 | | 297, 298, | 36 = 1X2 = | 13D2X9 = |
| | | | | | 299, 300 | 1X9 = 1X4 = | 1X4 = 1X10 = |
| | | | | | | 1X10 = 1X659= | 1X78= |
| 76 | 2.45 | 5 | 116 | 146, 194 | 301, 302, | 35 = 212 = | 11D3X15 = |
| | | | | | 303, 304 | 1X16 = 1X10 = | 1X10 = 1X78= |
| | | | | | | 1X659= | |
| 77 | 2.28 | 4 | 101 | | 305, 306, | 34 = 2X1 = | 8D1X1 = |
| | | | | | 307, 308 | 1X11 = | 1X1 = 1X11 = |
| | | | | | | 1X675= | 1X94= |
| 78 | 2.22 | 4 | 236 | | 309, 310, | 68 = 1X9 = | 53D1X11 = |
| | | | | | 311, 312 | 1X3 = 1X7 = | 1X53= |
| | | | | | | 1X634= | |
| 79 | 1.97 | 1 | 101 | | 313, 314, | 34 = 1X690= | 8D2X109= |
| | | | | | 315, 316 | | |
| 80 | 1.78 | 4 | 236 | 197 | 317, 318, | 65 = 1X10 = | 53D1X3 = |
| | | | | | 319, 320 | 1X1 = 1X3 = | 1X61= |
| | | | | | | 1X642= | |

TABLE 2

| SEQ | | | |
|---|---|---|---|
| ID | Variant | Sequence | |
| NO | ID NO | type | Sequence |
| 1 | 1 | VP1_aa | MSFVDHPPDWLEEVGEGLREFLGLDAGPPKPKPNQQHQDQARGLVLPGYN |
| | | | YLGPGNGLDRGEPVNRADEVAREHDISYNEQLEAGDNPYLKYNHADAEFQ |
| | | | EKLADDTSFGGNLGKAVFQAKKRVLEPFGLVEEGAKTAPTGKRIDDHFPK |
| | | | RKKARTEEDSKPSTSSDAEAGPSGSQQLQIPAQPASSLGADTMSAGGGGP |
| | | | LGDNNQGADGVGNASGDWHCDSTWMGDRVVTKSTRTWVLPSYNNHQYREI |
| | | | KSGSVDGSNANAYFGYSTPWGYFDFNRFHSHWSPRDWQRLINNYWGFRPR |
| | | | SLRVKIFNIQVKEVTVQDSTTTIANNLTSTVQVFTDDDYQLPYVVGNGTE |
| | | | GCLPAFPPQVFTLPQYGYATLNRDNTENPTERSSFFCLEYFPSKMLRTGN |
| | | | NFEFTYNFEEVPFHSSFAPSQNLFKLANPLVDQYLYRFVSTNNTGGVQFN |
| | | | KNLAGRYANTYKNWFPGPMGRTQGWNLGSGVNRASVSAFATTNRMELEGA |
| | | | SYQVPPQPNGMTNNLQGSNTYALENTMIFNSQPANPGTTATYLEGNMLIT |
| | | | SESETQPVNRVAYNVGGQMATNNQSSTTAPATGTYNLQEIVPGSVWMERD |
| | | | VYLQGPIWAKIPETGAHFHPSPAMGGFGLKHPPPMMLIKNTPVPGNITSF |
| | | | SDVPVSSFITQYSTGQVTVEMEWELKKENSKRWNPEIQYTNNYNDPQFVD |
| | | | FAPDSTGEYRTTRPIGTRYLTRPL* |
| 2 | 1 | VP1_nt | ATGTCTTTTGTTGATCACCCTCCAGATTGGTTGGAAGAAGTTGGTGAAGG |
| | | | TCTACGCGAGTTTTTGGGCCTTGATGCGGGCCCACCGAAACCAAAACCCA |
| | | | ATCAGCAGCATCAAGATCAAGCCCGTGGTCTTGTGCTGCCTGGTTATAAC |
| | | | TATCTCGGACCCGGAAACGGGCTCGATCGAGGAGAGCCTGTCAACAGGGC |
| | | | AGACGAGGTCGCGCGAGAGCACGACATCTCGTACAACGAGCAGCTTGAGG |
| | | | CGGGAGACAACCCCTACCTCAAGTACAACCACGCGGACGCCGAGTTTCAG |
| | | | GAGAAGCTCGCCGACGACACATCCTTCGGGGGAAACCTCGGAAAGGCAGT |
| | | | CTTTCAGGCCAAGAAAAGGGTTCTCGAACCTTTTGGCCTGGTTGAAGAGG |
| | | | GTGCTAAGACGGCCCCTACCGGAAAGCGGATAGACGACCACTTTCCAAAA |
| | | | AGAAAGAAGGCTCGGACCGAAGAGGACTCCAAGCCTTCCACCTCGTCAGA |
| | | | CGCCGAAGCTGGACCCAGCGGATCCCAGCAGCTGCAAATCCCAGCCCAAC |
| | | | CAGCCTCAAGTTTGGGAGCTGATACAATGTCTGCGGGAGGTGGCGGCCCA |
| | | | TTGGGCGACAATAACCAAGGTGCCGATGGAGTGGGCAATGCCTCGGGAGA |
| | | | TTGGCATTGCGATTCCACGTGGATGGGGGACAGAGTCGTCACCAAGTCCA |
| | | | CCCGAACCTGGGTGCTGCCCAGCTACAACAACCACCAGTACCGAGAGATC |
| | | | AAAAGCGGCTCCGTCGACGGAAGCAACGCCAACGCCTACTTTGGATACAG |
| | | | CACCCCCTGGGGGTACTTTGACTTTAACCGCTTCCACAGCCACTGGAGCC |
| | | | CCCGAGACTGGCAAAGACTCATCAACAACTACTGGGGCTTCAGACCCCGG |
| | | | TCCCTCAGAGTCAAAATCTTCAACATTCAAGTCAAAGAGGTCACGGTGCA |
| | | | GGACTCCACCACCACCATCGCCAACAACCTCACCTCCACCGTCCAAGTGT |
| | | | TTACGGACGACGACTACCAGCTGCCCTACGTCGTCGGCAACGGGACCGAG |
| | | | GGATGCCTGCCGGCCTTCCCTCCGCAGGTCTTTACGCTGCCGCAGTACGG |
| | | | TTACGCGACGCTGAACCGCGACAACACAGAAAATCCCACCGAGAGGAGCA |
| | | | GCTTCTTCTGCCTAGAGTACTTTCCCAGCAAGATGCTGAGAACGGGCAAC |
| | | | AACTTTGAGTTTACCTACAACTTTGAGGAGGTGCCCTTCCACTCCAGCTT |
| | | | CGCTCCCAGTCAGAACCTGTTCAAGCTGGCCAACCCGCTGGTGGACCAGT |
| | | | ACTTGTACCGCTTCGTGAGCACAAATAACACTGGCGGAGTCCAGTTCAAC |
| | | | AAGAACCTGGCCGGGAGATACGCCAACACCTACAAAAACTGGTTCCCGGG |
| | | | GCCCATGGGCCGAACCCAGGGCTGGAACCTGGGCTCCGGGGTCAACCGCG |
| | | | CCAGTGTCAGCGCCTTCGCCACGACCAATAGGATGGAGCTCGAGGGCGCG |
| | | | AGTTACCAGGTGCCCCCGCAGCCGAACGGCATGACCAACAACCTCCAGGG |
| | | | CAGCAACACCTATGCCCTGGAGAACACTATGATCTTCAACAGCCAGCCGG |
| | | | CGAACCCGGGCACCACCGCCACGTACCTCGAGGGCAACATGCTCATCACC |
| | | | AGCGAGAGCGAGACACAGCCGGTGAACCGCGTGGCGTACAACGTCGGCGG |
| | | | GCAGATGGCCACCAACAACCAGAGCTCCACCACTGCCCCCGCGACCGGCA |
| | | | CGTACAACCTCCAGGAAATCGTGCCCGGCAGCGTGTGGATGGAGAGGGAC |
| | | | GTGTACCTCCAAGGACCCATCTGGGCCAAGATCCCAGAGACAGGGGCGCA |
| | | | CTTTCACCCCTCTCCGGCCATGGGCGGATTCGGACTCAAACACCCACCGC |
| | | | CCATGATGCTCATCAAGAACACGCCTGTGCCCGGAAATATCACCAGCTTC |
| | | | TCGGACGTGCCCGTCAGCAGCTTCATCACCCAGTACAGCACCGGGCAGGT |
| | | | CACCGTGGAGATGGAGTGGGAGCTCAAGAAGGAAAACTCCAAGAGGTGGA |
| | | | ACCCAGAGATCCAGTACACAAACAACTACAACGACCCCCAGTTTGTGGAC |
| | | | TTTGCCCCGGACAGCACCGGGGAATACAGAACCACCAGACCTATCGGAAC |
| | | | CCGATACCTTACCCGACCCCTTTAA |
| 3 | 1 | MAAP_aa | MRAHRNQNPISSIKIKPVVLCCLVITISDPETGSIEESLSTGQTRSREST |
| | | | TSRTTSSLRRETTPTSSTTTRTPSFRRSSPTTHPSGETSERQSFRPRKGF |
| | | | SNLLAWLKRVLRRPLPESG* |
| 4 | 1 | MAAP_nt | ATGCGGGCCCACCGAAACCAAAACCCAATCAGCAGCATCAAGATCAAGCC |
| | | | CGTGGTCTTGTGCTGCCTGGTTATAACTATCTCGGACCCGGAAACGGGCT |
| | | | CGATCGAGGAGAGCCTGTCAACAGGGCAGACGAGGTCGCGCGAGAGCACG |
| | | | ACATCTCGTACAACGAGCAGCTTGAGGCGGGAGACAACCCCTACCTCAAG |
| | | | TACAACCACGCGGACGCCGAGTTTCAGGAGAAGCTCGCCGACGACACATC |
| | | | CTTCGGGGGAAACCTCGGAAAGGCAGTCTTTCAGGCCAAGAAAAGGGTTC |
| | | | TCGAACCTTTTGGCCTGGTTGAAGAGGGTGCTAAGACGGCCCCTACCGGA |
| | | | AAGCGGATAG |
| 5 | 2 | VP1_aa | MSFVDHPPDWLEEVGEGLREFLGLHAGPPKIKPNQQHQDQARGLVLPGYN |
| | | | YLGPGNGLDRGEPVNRADEVAREHDISYNEQLEAGDNPYLKYNHADAEFQ |
| | | | EKLADDTSFGGNLGKAVFQAKKRVLEPFGLVEEGAKTAPTGKRIDDHFPK |
| | | | RKKARTEEDSKPSTSSDAEAGPSGSQQLQIPAQPASSLGADTMSAGGGGP |
| | | | LGDNNQGADGVGNASGDWHCDSTWMGDRVVTKSTRTWVLPSYNNHQYREI |
| | | | KSGSVDGSNANAYFGYSTPWGYFDFNRFHSHWSPRDWQRLINNYWGFRPR |
| | | | SLRVKIFNIQVKEVTVQDSTTTIANNLTSTVQVFTDDDYQLPYVVGNGTE |
| | | | GCLPAFPPQVFTLPQYGYATLNRDNTENPTERSSFFCLEYFPSKMLRTGN |
| | | | NFEFTYNFEEVPFHSSFAPSQNLFKLANPLVDQYLYRFVSTNNTGGVQFN |
| | | | KNLAGRYANTYKNWFPGPMGRTQGWNLGSGVNRASVSAFATTNRMELEGA |
| | | | SYQVPPQPNGMTNNLQGSNTYALENTMIFNSQPANPGTTATYLEGNMLIT |
| | | | SESETQPVNRVAYNVGGQMATNNQSSTTAPATGTYNLQEIVPGSVWMERD |
| | | | VYLQGPIWAKIPETGAHFHPSPAMGGFGLKHPPPMMLIKNTPVPGNITSF |
| | | | SDVPVSSFITQYSTGQVTVEMEWELKKENSKRWNPEIQYTNNYNDPQFVD |
| | | | FAPDSTGEYRTTRPIGTRYLTRPL* |
| 6 | 2 | VP1_nt | ATGTCTTTTGTTGATCACCCTCCAGATTGGTTGGAAGAAGTTGGTGAAGG |
| | | | CCTTCGCGAGTTTTTGGGCCTTCATGCGGGCCCACCGAAAATTAAACCCA |
| | | | ATCAGCAGCATCAAGATCAAGCCCGTGGTCTTGTGCTGCCTGGTTATAAC |
| | | | TATCTCGGACCCGGAAACGGGCTCGATCGAGGAGAGCCTGTCAACAGGGC |
| | | | AGACGAGGTCGCGCGAGAGCACGACATCTCGTACAACGAGCAGCTTGAGG |
| | | | CGGGAGACAACCCCTACCTCAAGTACAACCACGCGGACGCCGAGTTTCAG |
| | | | GAGAAGCTCGCCGACGACACATCCTTCGGGGGAAACCTCGGAAAGGCAGT |
| | | | CTTTCAGGCCAAGAAAAGGGTTCTCGAACCTTTTGGCCTGGTTGAAGAGG |
| | | | GTGCTAAGACGGCCCCTACCGGAAAGCGGATAGACGACCACTTTCCAAAA |
| | | | AGAAAGAAGGCTCGGACCGAAGAGGACTCCAAGCCTTCCACCTCGTCAGA |
| | | | CGCCGAAGCTGGACCCAGCGGATCCCAGCAGCTGCAAATCCCAGCCCAAC |
| | | | CAGCCTCAAGTTTGGGAGCTGATACAATGTCTGCGGGAGGTGGCGGCCCA |
| | | | TTGGGCGACAATAACCAAGGTGCCGATGGAGTGGGCAATGCCTCGGGAGA |
| | | | TTGGCATTGCGATTCCACGTGGATGGGGGACAGAGTCGTCACCAAGTCCA |
| | | | CCCGAACCTGGGTGCTGCCCAGCTACAACAACCACCAGTACCGAGAGATC |
| | | | AAAAGCGGCTCCGTCGACGGAAGCAACGCCAACGCCTACTTTGGATACAG |
| | | | CACCCCCTGGGGGTACTTTGACTTTAACCGCTTCCACAGCCACTGGAGCC |
| | | | CCCGAGACTGGCAAAGACTCATCAACAACTACTGGGGCTTCAGACCCCGG |
| | | | TCCCTCAGAGTCAAAATCTTCAACATTCAAGTCAAAGAGGTCACGGTGCA |
| | | | GGACTCCACCACCACCATCGCCAACAACCTCACCTCCACCGTCCAAGTGT |
| | | | TTACGGACGACGACTACCAGCTGCCCTACGTCGTCGGCAACGGGACCGAG |
| | | | GGATGCCTGCCGGCCTTCCCTCCGCAGGTCTTTACGCTGCCGCAGTACGG |
| | | | TTACGCGACGCTGAACCGCGACAACACAGAAAATCCCACCGAGAGGAGCA |
| | | | GCTTCTTCTGCCTAGAGTACTTTCCCAGCAAGATGCTGAGAACGGGCAAC |
| | | | AACTTTGAGTTTACCTACAACTTTGAGGAGGTGCCCTTCCACTCCAGCTT |
| | | | CGCTCCCAGTCAGAACCTGTTCAAGCTGGCCAACCCGCTGGTGGACCAGT |
| | | | ACTTGTACCGCTTCGTGAGCACAAATAACACTGGCGGAGTCCAGTTCAAC |
| | | | AAGAACCTGGCCGGGAGATACGCCAACACCTACAAAAACTGGTTCCCGGG |
| | | | GCCCATGGGCCGAACCCAGGGCTGGAACCTGGGCTCCGGGGTCAACCGCG |
| | | | CCAGTGTCAGCGCCTTCGCCACGACCAATAGGATGGAGCTCGAGGGCGCG |
| | | | AGTTACCAGGTGCCCCCGCAGCCGAACGGCATGACCAACAACCTCCAGGG |
| | | | CAGCAACACCTATGCCCTGGAGAACACTATGATCTTCAACAGCCAGCCGG |
| | | | CGAACCCGGGCACCACCGCCACGTACCTCGAGGGCAACATGCTCATCACC |
| | | | AGCGAGAGCGAGACACAGCCGGTGAACCGCGTGGCGTACAACGTCGGCGG |
| | | | GCAGATGGCCACCAACAACCAGAGCTCCACCACTGCCCCCGCGACCGGCA |
| | | | CGTACAACCTCCAGGAAATCGTGCCCGGCAGCGTGTGGATGGAGAGGGAC |
| | | | GTGTACCTCCAAGGACCCATCTGGGCCAAGATCCCAGAGACAGGGGCGCA |
| | | | CTTTCACCCCTCTCCGGCCATGGGCGGATTCGGACTCAAACACCCACCGC |
| | | | CCATGATGCTCATCAAGAACACGCCTGTGCCCGGAAATATCACCAGCTTC |
| | | | TCGGACGTGCCCGTCAGCAGCTTCATCACCCAGTACAGCACCGGGCAGGT |
| | | | CACCGTGGAGATGGAGTGGGAGCTCAAGAAGGAAAACTCCAAGAGGTGGA |
| | | | ACCCAGAGATCCAGTACACAAACAACTACAACGACCCCCAGTTTGTGGAC |
| | | | TTTGCCCCGGACAGCACCGGGGAATACAGAACCACCAGACCTATCGGAAC |
| | | | CCGATACCTTACCCGACCCCTTTAA |
| 7 | 2 | MAAP_aa | MRAHRKLNPISSIKIKPVVLCCLVITISDPETGSIEESLSTGQTRSREST |
| | | | TSRTTSSLRRETTPTSSTTTRTPSFRRSSPTTHPSGETSERQSFRPRKGF |
| | | | SNLLAWLKRVLRRPLPESG* |
| 8 | 2 | MAAP_nt | ATGCGGGCCCACCGAAAATTAAACCCAATCAGCAGCATCAAGATCAAGCC |
| | | | CGTGGTCTTGTGCTGCCTGGTTATAACTATCTCGGACCCGGAAACGGGCT |
| | | | CGATCGAGGAGAGCCTGTCAACAGGGCAGACGAGGTCGCGCGAGAGCACG |
| | | | ACATCTCGTACAACGAGCAGCTTGAGGCGGGAGACAACCCCTACCTCAAG |
| | | | TACAACCACGCGGACGCCGAGTTTCAGGAGAAGCTCGCCGACGACACATC |
| | | | CTTCGGGGGAAACCTCGGAAAGGCAGTCTTTCAGGCCAAGAAAAGGGTTC |
| | | | TCGAACCTTTTGGCCTGGTTGAAGAGGGTGCTAAGACGGCCCCTACCGGA |
| | | | AAGCGGATAG |
| 9 | 3 | VP1_aa | MSFVDHPPDWLEEVGEGLREFLGLEAGPPKPKPNQQHQSTNARGLVLPGY |
| | | | KYLGPGNGLDRGPPVNRADEVAREHDISYNEQLEAGDNPYLKYNHADAEF |
| | | | QEKLADDTSFGGNLGKAVFQAKKRVLEPFGLVEEGAKTAPTGKRIDDHFP |
| | | | KRKKARTEEDSKPSTSSDAEAGPSGSQQLQIPAQPASSLGADTMSAGGGG |
| | | | PLGDNNQGADGVGNASGDWHCDSTWMGDRVVTKSTRTWVLPSYNNHQYRE |
| | | | IKSGSVDGSNANAYFGYSTPWGYFDFNRFHSHWSPRDWQRLINNYWGFRP |
| | | | RSLRVKIFNIQVKEVTVQDSTTTIANNLTSTVQVFTDDDYQLPYVVGNGT |
| | | | EGCLPAFPPQVFTLPQYGYATLNRDNTENPTERSSFFCLEYFPSKMLRTG |
| | | | NNFEFTYNFEEVPFHSSFAPSQNLFKLANPLVDQYLYRFVSTNNTGGVQF |
| | | | NKNLAGRYANTYKNWFPGPMGRTQGWNLGSGVNRASVSAFATTNRMELEG |
| | | | ASYQVPPQPNGMTNNLQGSNTYALENTMIFNSQPANPGTTATYLEGNMLI |
| | | | TSESETQPVNRVAYNVGGQMATNNQSSTTAPATGTYNLQEIVPGSVWMER |
| | | | DVYLQGPIWAKIPETGAHFHPSPAMGGFGLKHPPPMMLIKNTPVPGNITS |
| | | | FSDVPVSSFITQYSTGQVTVEMEWELKKENSKRWNPEIQYTNNYNDPQFV |
| | | | DFAPDSTGEYRTTRPIGTRYLTRPL* |
| 10 | 3 | VP1_nt | ATGTCTTTTGTTGATCACCCTCCAGATTGGTTGGAAGAAGTTGGTGAAGG |
| | | | TCTTCGCGAGTTTTTGGGCCTTGAAGCGGGCCCACCGAAACCAAAACCCA |
| | | | ATCAGCAGCATCAATCGACAAATGCCCGTGGTCTTGTGCTGCCTGGTTAT |
| | | | AAATATCTCGGACCCGGAAACGGGCTCGATCGAGGACCACCTGTCAACAG |
| | | | GGCAGACGAGGTCGCGCGAGAGCACGACATCTCGTACAACGAGCAGCTTG |
| | | | AGGCGGGAGACAACCCCTACCTCAAGTACAACCACGCGGACGCCGAGTTT |
| | | | CAGGAGAAGCTCGCCGACGACACATCCTTCGGGGGAAACCTCGGAAAGGC |
| | | | AGTCTTTCAGGCCAAGAAAAGGGTTCTCGAACCTTTTGGCCTGGTTGAAG |
| | | | AGGGTGCTAAGACGGCCCCTACCGGAAAGCGGATAGACGACCACTTTCCA |
| | | | AAAAGAAAGAAGGCTCGGACCGAAGAGGACTCCAAGCCTTCCACCTCGTC |
| | | | AGACGCCGAAGCTGGACCCAGCGGATCCCAGCAGCTGCAAATCCCAGCCC |
| | | | AACCAGCCTCAAGTTTGGGAGCTGATACAATGTCTGCGGGAGGTGGCGGC |
| | | | CCATTGGGCGACAATAACCAAGGTGCCGATGGAGTGGGCAATGCCTCGGG |
| | | | AGATTGGCATTGCGATTCCACGTGGATGGGGGACAGAGTCGTCACCAAGT |
| | | | CCACCCGAACCTGGGTGCTGCCCAGCTACAACAACCACCAGTACCGAGAG |
| | | | ATCAAAAGCGGCTCCGTCGACGGAAGCAACGCCAACGCCTACTTTGGATA |
| | | | CAGCACCCCCTGGGGGTACTTTGACTTTAACCGCTTCCACAGCCACTGGA |
| | | | GCCCCCGAGACTGGCAAAGACTCATCAACAACTACTGGGGCTTCAGACCC |
| | | | CGGTCCCTCAGAGTCAAAATCTTCAACATTCAAGTCAAAGAGGTCACGGT |
| | | | GCAGGACTCCACCACCACCATCGCCAACAACCTCACCTCCACCGTCCAAG |
| | | | TGTTTACGGACGACGACTACCAGCTGCCCTACGTCGTCGGCAACGGGACC |
| | | | GAGGGATGCCTGCCGGCCTTCCCTCCGCAGGTCTTTACGCTGCCGCAGTA |
| | | | CGGTTACGCGACGCTGAACCGCGACAACACAGAAAATCCCACCGAGAGGA |
| | | | GCAGCTTCTTCTGCCTAGAGTACTTTCCCAGCAAGATGCTGAGAACGGGC |
| | | | AACAACTTTGAGTTTACCTACAACTTTGAGGAGGTGCCCTTCCACTCCAG |
| | | | CTTCGCTCCCAGTCAGAACCTGTTCAAGCTGGCCAACCCGCTGGTGGACC |
| | | | AGTACTTGTACCGCTTCGTGAGCACAAATAACACTGGCGGAGTCCAGTTC |
| | | | AACAAGAACCTGGCCGGGAGATACGCCAACACCTACAAAAACTGGTTCCC |
| | | | GGGGCCCATGGGCCGAACCCAGGGCTGGAACCTGGGCTCCGGGGTCAACC |
| | | | GCGCCAGTGTCAGCGCCTTCGCCACGACCAATAGGATGGAGCTCGAGGGC |
| | | | GCGAGTTACCAGGTGCCCCCGCAGCCGAACGGCATGACCAACAACCTCCA |
| | | | GGGCAGCAACACCTATGCCCTGGAGAACACTATGATCTTCAACAGCCAGC |
| | | | CGGCGAACCCGGGCACCACCGCCACGTACCTCGAGGGCAACATGCTCATC |
| | | | ACCAGCGAGAGCGAGACACAGCCGGTGAACCGCGTGGCGTACAACGTCGG |
| | | | CGGGCAGATGGCCACCAACAACCAGAGCTCCACCACTGCCCCCGCGACCG |
| | | | GCACGTACAACCTCCAGGAAATCGTGCCCGGCAGCGTGTGGATGGAGAGG |
| | | | GACGTGTACCTCCAAGGACCCATCTGGGCCAAGATCCCAGAGACAGGGGC |
| | | | GCACTTTCACCCCTCTCCGGCCATGGGCGGATTCGGACTCAAACACCCAC |
| | | | CGCCCATGATGCTCATCAAGAACACGCCTGTGCCCGGAAATATCACCAGC |
| | | | TTCTCGGACGTGCCCGTCAGCAGCTTCATCACCCAGTACAGCACCGGGCA |
| | | | GGTCACCGTGGAGATGGAGTGGGAGCTCAAGAAGGAAAACTCCAAGAGGT |
| | | | GGAACCCAGAGATCCAGTACACAAACAACTACAACGACCCCCAGTTTGTG |
| | | | GACTTTGCCCCGGACAGCACCGGGGAATACAGAACCACCAGACCTATCGG |
| | | | AACCCGATACCTTACCCGACCCCTTTAA |
| 11 | 3 | MAAP_aa | MPVVLCCLVINISDPETGSIEDHLSTGQTRSRESTTSRTTSSLRRETTPT |
| | | | SSTTTRTPSFRRSSPTTHPSGETSERQSFRPRKGFSNLLAWLKRVLRRPL |
| | | | PESG* |
| 12 | 3 | MAAP_nt | ATGCCCGTGGTCTTGTGCTGCCTGGTTATAAATATCTCGGACCCGGAAAC |
| | | | GGGCTCGATCGAGGACCACCTGTCAACAGGGCAGACGAGGTCGCGCGAGA |
| | | | GCACGACATCTCGTACAACGAGCAGCTTGAGGCGGGAGACAACCCCTACC |
| | | | TCAAGTACAACCACGCGGACGCCGAGTTTCAGGAGAAGCTCGCCGACGAC |
| | | | ACATCCTTCGGGGGAAACCTCGGAAAGGCAGTCTTTCAGGCCAAGAAAAG |
| | | | GGTTCTCGAACCTTTTGGCCTGGTTGAAGAGGGTGCTAAGACGGCCCCTA |
| | | | CCGGAAAGCGGATAG |
| 13 | 4 | VP1_aa | MSFVDHPPDWLEEVGNGLREFLGLEAGPPKPKPNQQHQDQARGLVLPGYN |
| | | | YLGPGNGLDRGEPVNRADEVAREHDISYNEQLEAGDNPYLKYNHADAEFQ |
| | | | EKLADDTSFGGNLGKAVFQAKKRVLEPFGLVEEGAKTAPTGKRIDDHFPK |
| | | | RKKARTEEDSKPSTSSDAEAGPSGSQQLQIPAQPASSLGADTMSAGGGGP |
| | | | LGDNNQGADGVGNASGDWHCDSTWMGDRVVTKSTRTWVLPSYNNHQYREI |
| | | | KSGSVDGSNANAYFGYSTPWGYFDFNRFHSHWSPRDWQRLINNYWGFRPR |
| | | | SLRVKIFNIQVKEVTVQDSTTTIANNLTSTVQVFTDDDYQLPYVVGNGTE |
| | | | GCLPAFPPQVFTLPQYGYATLNRDNTENPTERSSFFCLEYFPSKMLRTGN |
| | | | NFEFTYNFEEVPFHSSFAPSQNLFKLANPLVDQYLYRFVSTNNTGGVQFN |
| | | | KNLAGRYANTYKNWFPGPMGRTQGWNLGSGVNRASVSAFATTNRMELEGA |
| | | | SYQVPPQPNGMTNNLQGSNTYALENTMIFNSQPANPGTTATYLEGNMLIT |
| | | | SESETQPVNRVAYNVGGQMATNNQSSTTAPATGTYNLQEIVPGSVWMERD |
| | | | VYLQGPIWAKIPETGAHFHPSPAMGGFGLKHPPPMMLIKNTPVPGNITSF |
| | | | SDVPVSSFITQYSTGQVTVEMEWELKKENSKRWNPEIQYTNNYNDPQFVD |
| | | | FAPDSTGEYRTTRPIGTRYLTRPL* |
| 14 | 4 | VP1_nt | ATGTCTTTTGTTGATCACCCTCCAGATTGGTTGGAAGAAGTTGGTAATGG |
| | | | TCTGCGCGAGTTTTTGGGCCTTGAAGCGGGCCCACCGAAACCAAAACCCA |
| | | | ATCAGCAGCATCAAGATCAAGCCCGTGGTCTTGTGCTGCCTGGTTATAAC |
| | | | TATCTCGGACCCGGAAACGGGCTCGATCGAGGAGAGCCTGTCAACAGGGC |
| | | | AGACGAGGTCGCGCGAGAGCACGACATCTCGTACAACGAGCAGCTTGAGG |
| | | | CGGGAGACAACCCCTACCTCAAGTACAACCACGCGGACGCCGAGTTTCAG |
| | | | GAGAAGCTCGCCGACGACACATCCTTCGGGGGAAACCTCGGAAAGGCAGT |
| | | | CTTTCAGGCCAAGAAAAGGGTTCTCGAACCTTTTGGCCTGGTTGAAGAGG |
| | | | GTGCTAAGACGGCCCCTACCGGAAAGCGGATAGACGACCACTTTCCAAAA |
| | | | AGAAAGAAGGCTCGGACCGAAGAGGACTCCAAGCCTTCCACCTCGTCAGA |
| | | | CGCCGAAGCTGGACCCAGCGGATCCCAGCAGCTGCAAATCCCAGCCCAAC |
| | | | CAGCCTCAAGTTTGGGAGCTGATACAATGTCTGCGGGAGGTGGCGGCCCA |
| | | | TTGGGCGACAATAACCAAGGTGCCGATGGAGTGGGCAATGCCTCGGGAGA |
| | | | TTGGCATTGCGATTCCACGTGGATGGGGGACAGAGTCGTCACCAAGTCCA |
| | | | CCCGAACCTGGGTGCTGCCCAGCTACAACAACCACCAGTACCGAGAGATC |
| | | | AAAAGCGGCTCCGTCGACGGAAGCAACGCCAACGCCTACTTTGGATACAG |
| | | | CACCCCCTGGGGGTACTTTGACTTTAACCGCTTCCACAGCCACTGGAGCC |
| | | | CCCGAGACTGGCAAAGACTCATCAACAACTACTGGGGCTTCAGACCCCGG |
| | | | TCCCTCAGAGTCAAAATCTTCAACATTCAAGTCAAAGAGGTCACGGTGCA |
| | | | GGACTCCACCACCACCATCGCCAACAACCTCACCTCCACCGTCCAAGTGT |
| | | | TTACGGACGACGACTACCAGCTGCCCTACGTCGTCGGCAACGGGACCGAG |
| | | | GGATGCCTGCCGGCCTTCCCTCCGCAGGTCTTTACGCTGCCGCAGTACGG |
| | | | TTACGCGACGCTGAACCGCGACAACACAGAAAATCCCACCGAGAGGAGCA |
| | | | GCTTCTTCTGCCTAGAGTACTTTCCCAGCAAGATGCTGAGAACGGGCAAC |
| | | | AACTTTGAGTTTACCTACAACTTTGAGGAGGTGCCCTTCCACTCCAGCTT |
| | | | CGCTCCCAGTCAGAACCTGTTCAAGCTGGCCAACCCGCTGGTGGACCAGT |
| | | | ACTTGTACCGCTTCGTGAGCACAAATAACACTGGCGGAGTCCAGTTCAAC |
| | | | AAGAACCTGGCCGGGAGATACGCCAACACCTACAAAAACTGGTTCCCGGG |
| | | | GCCCATGGGCCGAACCCAGGGCTGGAACCTGGGCTCCGGGGTCAACCGCG |
| | | | CCAGTGTCAGCGCCTTCGCCACGACCAATAGGATGGAGCTCGAGGGCGCG |
| | | | AGTTACCAGGTGCCCCCGCAGCCGAACGGCATGACCAACAACCTCCAGGG |
| | | | CAGCAACACCTATGCCCTGGAGAACACTATGATCTTCAACAGCCAGCCGG |
| | | | CGAACCCGGGCACCACCGCCACGTACCTCGAGGGCAACATGCTCATCACC |
| | | | AGCGAGAGCGAGACACAGCCGGTGAACCGCGTGGCGTACAACGTCGGCGG |
| | | | GCAGATGGCCACCAACAACCAGAGCTCCACCACTGCCCCCGCGACCGGCA |
| | | | CGTACAACCTCCAGGAAATCGTGCCCGGCAGCGTGTGGATGGAGAGGGAC |
| | | | GTGTACCTCCAAGGACCCATCTGGGCCAAGATCCCAGAGACAGGGGCGCA |
| | | | CTTTCACCCCTCTCCGGCCATGGGCGGATTCGGACTCAAACACCCACCGC |
| | | | CCATGATGCTCATCAAGAACACGCCTGTGCCCGGAAATATCACCAGCTTC |
| | | | TCGGACGTGCCCGTCAGCAGCTTCATCACCCAGTACAGCACCGGGCAGGT |
| | | | CACCGTGGAGATGGAGTGGGAGCTCAAGAAGGAAAACTCCAAGAGGTGGA |
| | | | ACCCAGAGATCCAGTACACAAACAACTACAACGACCCCCAGTTTGTGGAC |
| | | | TTTGCCCCGGACAGCACCGGGGAATACAGAACCACCAGACCTATCGGAAC |
| | | | CCGATACCTTACCCGACCCCTTTAA |
| 15 | 4 | MAAP_aa | MVCASFWALKRAHRNQNPISSIKIKPVVLCCLVITISDPETGSIEESLST |
| | | | GQTRSRESTTSRTTSSLRRETTPTSSTTTRTPSFRRSSPTTHPSGETSER |
| | | | QSFRPRKGFSNLLAWLKRVLRRPLPESG* |
| 16 | 4 | MAAP_nt | ATGGTCTGCGCGAGTTTTTGGGCCTTGAAGCGGGCCCACCGAAACCAAAA |
| | | | CCCAATCAGCAGCATCAAGATCAAGCCCGTGGTCTTGTGCTGCCTGGTTA |
| | | | TAACTATCTCGGACCCGGAAACGGGCTCGATCGAGGAGAGCCTGTCAACA |
| | | | GGGCAGACGAGGTCGCGCGAGAGCACGACATCTCGTACAACGAGCAGCTT |
| | | | GAGGCGGGAGACAACCCCTACCTCAAGTACAACCACGCGGACGCCGAGTT |
| | | | TCAGGAGAAGCTCGCCGACGACACATCCTTCGGGGGAAACCTCGGAAAGG |
| | | | CAGTCTTTCAGGCCAAGAAAAGGGTTCTCGAACCTTTTGGCCTGGTTGAA |
| | | | GAGGGTGCTAAGACGGCCCCTACCGGAAAGCGGATAG |
| 17 | 5 | VP1_aa | MSFVDHPPDWLEEVGEGLDEFLGLEAGPPKPKPNQQHQDQARGLVLPGYN |
| | | | YLGPGNGLDRGEPVNRADEVAREHDISYNEQLEAGDNPYLKYNHADAEFQ |
| | | | EKLADDTSFGGNLGKAVFQAKKRVLEPFGLVEEGAKTAPTGKRIDDHFPK |
| | | | RKKARTEEDSKPSTSSDAEAGPSGSQQLQIPAQPASSLGADTMSAGGGGP |
| | | | LGDNNQGADGVGNASGDWHCDSTWMGDRVVTKSTRTWVLPSYNNHQYREI |
| | | | KSGSVDGSNANAYFGYSTPWGYFDFNRFHSHWSPRDWQRLINNYWGFRPR |
| | | | SLRVKIFNIQVKEVTVQDSTTTIANNLTSTVQVFTDDDYQLPYVVGNGTE |
| | | | GCLPAFPPQVFTLPQYGYATLNRDNTENPTERSSFFCLEYFPSKMLRTGN |
| | | | NFEFTYNFEEVPFHSSFAPSQNLFKLANPLVDQYLYRFVSTNNTGGVQFN |
| | | | KNLAGRYANTYKNWFPGPMGRTQGWNLGSGVNRASVSAFATTNRMELEGA |
| | | | SYQVPPQPNGMTNNLQGSNTYALENTMIFNSQPANPGTTATYLEGNMLIT |
| | | | SESETQPVNRVAYNVGGQMATNNQSSTTAPATGTYNLQEIVPGSVWMERD |
| | | | VYLQGPIWAKIPETGAHFHPSPAMGGFGLKHPPPMMLIKNTPVPGNITSF |
| | | | SDVPVSSFITQYSTGQVTVEMEWELKKENSKRWNPEIQYTNNYNDPQFVD |
| | | | FAPDSTGEYRTTRPIGTRYLTRPL* |
| 18 | 5 | VP1_nt | ATGTCTTTTGTTGATCACCCTCCAGATTGGTTGGAAGAAGTTGGTGAAGG |
| | | | TCTTGATGAGTTTTTGGGCCTTGAAGCGGGCCCACCGAAACCAAAACCCA |
| | | | ATCAGCAGCATCAAGATCAAGCCCGTGGTCTTGTGCTGCCTGGTTATAAC |
| | | | TATCTCGGACCCGGAAACGGGCTCGATCGAGGAGAGCCTGTCAACAGGGC |
| | | | AGACGAGGTCGCGCGAGAGCACGACATCTCGTACAACGAGCAGCTTGAGG |
| | | | CGGGAGACAACCCCTACCTCAAGTACAACCACGCGGACGCCGAGTTTCAG |
| | | | GAGAAGCTCGCCGACGACACATCCTTCGGGGGAAACCTCGGAAAGGCAGT |
| | | | CTTTCAGGCCAAGAAAAGGGTTCTCGAACCTTTTGGCCTGGTTGAAGAGG |
| | | | GTGCTAAGACGGCCCCTACCGGAAAGCGGATAGACGACCACTTTCCAAAA |
| | | | AGAAAGAAGGCTCGGACCGAAGAGGACTCCAAGCCTTCCACCTCGTCAGA |
| | | | CGCCGAAGCTGGACCCAGCGGATCCCAGCAGCTGCAAATCCCAGCCCAAC |
| | | | CAGCCTCAAGTTTGGGAGCTGATACAATGTCTGCGGGAGGTGGCGGCCCA |
| | | | TTGGGCGACAATAACCAAGGTGCCGATGGAGTGGGCAATGCCTCGGGAGA |
| | | | TTGGCATTGCGATTCCACGTGGATGGGGGACAGAGTCGTCACCAAGTCCA |
| | | | CCCGAACCTGGGTGCTGCCCAGCTACAACAACCACCAGTACCGAGAGATC |
| | | | AAAAGCGGCTCCGTCGACGGAAGCAACGCCAACGCCTACTTTGGATACAG |
| | | | CACCCCCTGGGGGTACTTTGACTTTAACCGCTTCCACAGCCACTGGAGCC |
| | | | CCCGAGACTGGCAAAGACTCATCAACAACTACTGGGGCTTCAGACCCCGG |
| | | | TCCCTCAGAGTCAAAATCTTCAACATTCAAGTCAAAGAGGTCACGGTGCA |
| | | | GGACTCCACCACCACCATCGCCAACAACCTCACCTCCACCGTCCAAGTGT |
| | | | TTACGGACGACGACTACCAGCTGCCCTACGTCGTCGGCAACGGGACCGAG |
| | | | GGATGCCTGCCGGCCTTCCCTCCGCAGGTCTTTACGCTGCCGCAGTACGG |
| | | | TTACGCGACGCTGAACCGCGACAACACAGAAAATCCCACCGAGAGGAGCA |
| | | | GCTTCTTCTGCCTAGAGTACTTTCCCAGCAAGATGCTGAGAACGGGCAAC |
| | | | AACTTTGAGTTTACCTACAACTTTGAGGAGGTGCCCTTCCACTCCAGCTT |
| | | | CGCTCCCAGTCAGAACCTGTTCAAGCTGGCCAACCCGCTGGTGGACCAGT |
| | | | ACTTGTACCGCTTCGTGAGCACAAATAACACTGGCGGAGTCCAGTTCAAC |
| | | | AAGAACCTGGCCGGGAGATACGCCAACACCTACAAAAACTGGTTCCCGGG |
| | | | GCCCATGGGCCGAACCCAGGGCTGGAACCTGGGCTCCGGGGTCAACCGCG |
| | | | CCAGTGTCAGCGCCTTCGCCACGACCAATAGGATGGAGCTCGAGGGCGCG |
| | | | AGTTACCAGGTGCCCCCGCAGCCGAACGGCATGACCAACAACCTCCAGGG |
| | | | CAGCAACACCTATGCCCTGGAGAACACTATGATCTTCAACAGCCAGCCGG |
| | | | CGAACCCGGGCACCACCGCCACGTACCTCGAGGGCAACATGCTCATCACC |
| | | | AGCGAGAGCGAGACACAGCCGGTGAACCGCGTGGCGTACAACGTCGGCGG |
| | | | GCAGATGGCCACCAACAACCAGAGCTCCACCACTGCCCCCGCGACCGGCA |
| | | | CGTACAACCTCCAGGAAATCGTGCCCGGCAGCGTGTGGATGGAGAGGGAC |
| | | | GTGTACCTCCAAGGACCCATCTGGGCCAAGATCCCAGAGACAGGGGCGCA |
| | | | CTTTCACCCCTCTCCGGCCATGGGCGGATTCGGACTCAAACACCCACCGC |
| | | | CCATGATGCTCATCAAGAACACGCCTGTGCCCGGAAATATCACCAGCTTC |
| | | | TCGGACGTGCCCGTCAGCAGCTTCATCACCCAGTACAGCACCGGGCAGGT |
| | | | CACCGTGGAGATGGAGTGGGAGCTCAAGAAGGAAAACTCCAAGAGGTGGA |
| | | | ACCCAGAGATCCAGTACACAAACAACTACAACGACCCCCAGTTTGTGGAC |
| | | | TTTGCCCCGGACAGCACCGGGGAATACAGAACCACCAGACCTATCGGAAC |
| | | | CCGATACCTTACCCGACCCCTTTAA |
| 19 | 5 | MAAP_aa | MSFWALKRAHRNQNPISSIKIKPVVLCCLVITISDPETGSIEESLSTGQT |
| | | | RSRESTTSRTTSSLRRETTPTSSTTTRTPSFRRSSPTTHPSGETSERQSF |
| | | | RPRKGFSNLLAWLKRVLRRPLPESG* |
| 20 | 5 | MAAP_nt | ATGAGTTTTTGGGCCTTGAAGCGGGCCCACCGAAACCAAAACCCAATCAG |
| | | | CAGCATCAAGATCAAGCCCGTGGTCTTGTGCTGCCTGGTTATAACTATCT |
| | | | CGGACCCGGAAACGGGCTCGATCGAGGAGAGCCTGTCAACAGGGCAGACG |
| | | | AGGTCGCGCGAGAGCACGACATCTCGTACAACGAGCAGCTTGAGGCGGGA |
| | | | GACAACCCCTACCTCAAGTACAACCACGCGGACGCCGAGTTTCAGGAGAA |
| | | | GCTCGCCGACGACACATCCTTCGGGGGAAACCTCGGAAAGGCAGTCTTTC |
| | | | AGGCCAAGAAAAGGGTTCTCGAACCTTTTGGCCTGGTTGAAGAGGGTGCT |
| | | | AAGACGGCCCCTACCGGAAAGCGGATAG |
| 21 | 6 | VP1_aa | MSFVDHPPDWLEEVYEGLREFLGLEAGPPKPKPNQQHQDQARGLVLPGYN |
| | | | YLGPGNGLDRGEPVNRADEVAREHDISYNEQLEAGDNPYLKYNHADAEFQ |
| | | | EKLADDTSFGGNLGKAVFQAKKRVLEPFGLVEEGAKTAPTGKRIDDHFPK |
| | | | RKKARTEEDSKPSTSSDAEAGPSGSQQLQIPAQPASSLGADTMSAGGGGP |
| | | | LGDNNQGADGVGNASGDWHCDSTWMGDRVVTKSTRTWVLPSYNNHQYREI |
| | | | KSGSVDGSNANAYFGYSTPWGYFDFNRFHSHWSPRDWQRLINNYWGFRPR |
| | | | SLRVKIFNIQVKEVTVQDSTTTIANNLTSTVQVFTDDDYQLPYVVGNGTE |
| | | | GCLPAFPPQVFTLPQYGYATLNRDNTENPTERSSFFCLEYFPSKMLRTGN |
| | | | NFEFTYNFEEVPFHSSFAPSQNLFKLANPLVDQYLYRFVSTNNTGGVQFN |
| | | | KNLAGRYANTYKNWFPGPMGRTQGWNLGSGVNRASVSAFATTNRMELEGA |
| | | | SYQVPPQPNGMTNNLQGSNTYALENTMIFNSQPANPGTTATYLEGNMLIT |
| | | | SESETQPVNRVAYNVGGQMATNNQSSTTAPATGTYNLQEIVPGSVWMERD |
| | | | VYLQGPIWAKIPETGAHFHPSPAMGGFGLKHPPPMMLIKNTPVPGNITSF |
| | | | SDVPVSSFITQYSTGQVTVEMEWELKKENSKRWNPEIQYTNNYNDPQFVD |
| | | | FAPDSTGEYRTTRPIGTRYLTRPL* |
| 22 | 6 | VP1_nt | ATGTCTTTTGTTGATCACCCTCCAGATTGGTTGGAAGAAGTTTATGAAGG |
| | | | TCTGCGCGAGTTTTTGGGCCTTGAAGCGGGCCCACCGAAACCAAAACCCA |
| | | | ATCAGCAGCATCAAGATCAAGCCCGTGGTCTTGTGCTGCCTGGTTATAAC |
| | | | TATCTCGGACCCGGAAACGGGCTCGATCGAGGAGAGCCTGTCAACAGGGC |
| | | | AGACGAGGTCGCGCGAGAGCACGACATCTCGTACAACGAGCAGCTTGAGG |
| | | | CGGGAGACAACCCCTACCTCAAGTACAACCACGCGGACGCCGAGTTTCAG |
| | | | GAGAAGCTCGCCGACGACACATCCTTCGGGGGAAACCTCGGAAAGGCAGT |
| | | | CTTTCAGGCCAAGAAAAGGGTTCTCGAACCTTTTGGCCTGGTTGAAGAGG |
| | | | GTGCTAAGACGGCCCCTACCGGAAAGCGGATAGACGACCACTTTCCAAAA |
| | | | AGAAAGAAGGCTCGGACCGAAGAGGACTCCAAGCCTTCCACCTCGTCAGA |
| | | | CGCCGAAGCTGGACCCAGCGGATCCCAGCAGCTGCAAATCCCAGCCCAAC |
| | | | CAGCCTCAAGTTTGGGAGCTGATACAATGTCTGCGGGAGGTGGCGGCCCA |
| | | | TTGGGCGACAATAACCAAGGTGCCGATGGAGTGGGCAATGCCTCGGGAGA |
| | | | TTGGCATTGCGATTCCACGTGGATGGGGGACAGAGTCGTCACCAAGTCCA |
| | | | CCCGAACCTGGGTGCTGCCCAGCTACAACAACCACCAGTACCGAGAGATC |
| | | | AAAAGCGGCTCCGTCGACGGAAGCAACGCCAACGCCTACTTTGGATACAG |
| | | | CACCCCCTGGGGGTACTTTGACTTTAACCGCTTCCACAGCCACTGGAGCC |
| | | | CCCGAGACTGGCAAAGACTCATCAACAACTACTGGGGCTTCAGACCCCGG |
| | | | TCCCTCAGAGTCAAAATCTTCAACATTCAAGTCAAAGAGGTCACGGTGCA |
| | | | GGACTCCACCACCACCATCGCCAACAACCTCACCTCCACCGTCCAAGTGT |
| | | | TTACGGACGACGACTACCAGCTGCCCTACGTCGTCGGCAACGGGACCGAG |
| | | | GGATGCCTGCCGGCCTTCCCTCCGCAGGTCTTTACGCTGCCGCAGTACGG |
| | | | TTACGCGACGCTGAACCGCGACAACACAGAAAATCCCACCGAGAGGAGCA |
| | | | GCTTCTTCTGCCTAGAGTACTTTCCCAGCAAGATGCTGAGAACGGGCAAC |
| | | | AACTTTGAGTTTACCTACAACTTTGAGGAGGTGCCCTTCCACTCCAGCTT |
| | | | CGCTCCCAGTCAGAACCTGTTCAAGCTGGCCAACCCGCTGGTGGACCAGT |
| | | | ACTTGTACCGCTTCGTGAGCACAAATAACACTGGCGGAGTCCAGTTCAAC |
| | | | AAGAACCTGGCCGGGAGATACGCCAACACCTACAAAAACTGGTTCCCGGG |
| | | | GCCCATGGGCCGAACCCAGGGCTGGAACCTGGGCTCCGGGGTCAACCGCG |
| | | | CCAGTGTCAGCGCCTTCGCCACGACCAATAGGATGGAGCTCGAGGGCGCG |
| | | | AGTTACCAGGTGCCCCCGCAGCCGAACGGCATGACCAACAACCTCCAGGG |
| | | | CAGCAACACCTATGCCCTGGAGAACACTATGATCTTCAACAGCCAGCCGG |
| | | | CGAACCCGGGCACCACCGCCACGTACCTCGAGGGCAACATGCTCATCACC |
| | | | AGCGAGAGCGAGACACAGCCGGTGAACCGCGTGGCGTACAACGTCGGCGG |
| | | | GCAGATGGCCACCAACAACCAGAGCTCCACCACTGCCCCCGCGACCGGCA |
| | | | CGTACAACCTCCAGGAAATCGTGCCCGGCAGCGTGTGGATGGAGAGGGAC |
| | | | GTGTACCTCCAAGGACCCATCTGGGCCAAGATCCCAGAGACAGGGGCGCA |
| | | | CTTTCACCCCTCTCCGGCCATGGGCGGATTCGGACTCAAACACCCACCGC |
| | | | CCATGATGCTCATCAAGAACACGCCTGTGCCCGGAAATATCACCAGCTTC |
| | | | TCGGACGTGCCCGTCAGCAGCTTCATCACCCAGTACAGCACCGGGCAGGT |
| | | | CACCGTGGAGATGGAGTGGGAGCTCAAGAAGGAAAACTCCAAGAGGTGGA |
| | | | ACCCAGAGATCCAGTACACAAACAACTACAACGACCCCCAGTTTGTGGAC |
| | | | TTTGCCCCGGACAGCACCGGGGAATACAGAACCACCAGACCTATCGGAAC |
| | | | CCGATACCTTACCCGACCCCTTTAA |
| 23 | 6 | MAAP_aa | MKVCASFWALKRAHRNQNPISSIKIKPVVLCCLVITISDPETGSIEESLS |
| | | | TGQTRSRESTTSRTTSSLRRETTPTSSTTTRTPSFRRSSPTTHPSGETSE |
| | | | RQSFRPRKGFSNLLAWLKRVLRRPLPESG* |
| 24 | 6 | MAAP_nt | ATGAAGGTCTGCGCGAGTTTTTGGGCCTTGAAGCGGGCCCACCGAAACCA |
| | | | AAACCCAATCAGCAGCATCAAGATCAAGCCCGTGGTCTTGTGCTGCCTGG |
| | | | TTATAACTATCTCGGACCCGGAAACGGGCTCGATCGAGGAGAGCCTGTCA |
| | | | ACAGGGCAGACGAGGTCGCGCGAGAGCACGACATCTCGTACAACGAGCAG |
| | | | CTTGAGGCGGGAGACAACCCCTACCTCAAGTACAACCACGCGGACGCCGA |
| | | | GTTTCAGGAGAAGCTCGCCGACGACACATCCTTCGGGGGAAACCTCGGAA |
| | | | AGGCAGTCTTTCAGGCCAAGAAAAGGGTTCTCGAACCTTTTGGCCTGGTT |
| | | | GAAGAGGGTGCTAAGACGGCCCCTACCGGAAAGCGGATAG |
| 25 | 7 | VP1_aa | MSFVDHPPDWLEEVGEGLREFLGLEAGPPKPKPNQQHSDEQARGLVLPGY |
| | | | NYLGPGNGLDRGEPVNEADEVAREHDISYNEQLEAGDNPYLKYNHADAEF |
| | | | QEKLADDTSFGGNLGKAVFQAKKRVLEPFGLVEEGAKTAPTGKRIDDHFP |
| | | | KRKKARTEEDSKPSTSSDAEAGPSGSQQLQIPAQPASSLGADTMSAGGGG |
| | | | PLGDNNQGADGVGNASGDWHCDSTWMGDRVVTKSTRTWVLPSYNNHQYRE |
| | | | IKSGSVDGSNANAYFGYSTPWGYFDFNRFHSHWSPRDWQRLINNYWGFRP |
| | | | RSLRVKIFNIQVKEVTVQDSTTTIANNLTSTVQVFTDDDYQLPYVVGNGT |
| | | | EGCLPAFPPQVFTLPQYGYATLNRDNTENPTERSSFFCLEYFPSKMLRTG |
| | | | NNFEFTYNFEEVPFHSSFAPSQNLFKLANPLVDQYLYRFVSTNNTGGVQF |
| | | | NKNLAGRYANTYKNWFPGPMGRTQGWNLGSGVNRASVSAFATTNRMELEG |
| | | | ASYQVPPQPNGMTNNLQGSNTYALENTMIFNSQPANPGTTATYLEGNMLI |
| | | | TSESETQPVNRVAYNVGGQMATNNQSSTTAPATGTYNLQEIVPGSVWMER |
| | | | DVYLQGPIWAKIPETGAHFHPSPAMGGFGLKHPPPMMLIKNTPVPGNITS |
| | | | FSDVPVSSFITQYSTGQVTVEMEWELKKENSKRWNPEIQYTNNYNDPQFV |
| | | | DFAPDSTGEYRTTRPIGTRYLTRPL* |
| 26 | 7 | VP1_nt | ATGTCTTTTGTTGATCACCCTCCAGATTGGTTGGAAGAAGTTGGTGAAGG |
| | | | TCTTCGCGAGTTTTTGGGCCTTGAAGCGGGCCCACCGAAACCAAAACCCA |
| | | | ATCAGCAGCATTCCGATGAGCAAGCCCGTGGTCTTGTGCTGCCTGGTTAT |
| | | | AACTATCTCGGACCCGGAAACGGGCTCGATCGAGGAGAGCCTGTCAACGA |
| | | | GGCAGACGAGGTCGCGCGAGAGCACGACATCTCGTACAACGAGCAGCTTG |
| | | | AGGCGGGAGACAACCCCTACCTCAAGTACAACCACGCGGACGCCGAGTTT |
| | | | CAGGAGAAGCTCGCCGACGACACATCCTTCGGGGGAAACCTCGGAAAGGC |
| | | | AGTCTTTCAGGCCAAGAAAAGGGTTCTCGAACCTTTTGGCCTGGTTGAAG |
| | | | AGGGTGCTAAGACGGCCCCTACCGGAAAGCGGATAGACGACCACTTTCCA |
| | | | AAAAGAAAGAAGGCTCGGACCGAAGAGGACTCCAAGCCTTCCACCTCGTC |
| | | | AGACGCCGAAGCTGGACCCAGCGGATCCCAGCAGCTGCAAATCCCAGCCC |
| | | | AACCAGCCTCAAGTTTGGGAGCTGATACAATGTCTGCGGGAGGTGGCGGC |
| | | | CCATTGGGCGACAATAACCAAGGTGCCGATGGAGTGGGCAATGCCTCGGG |
| | | | AGATTGGCATTGCGATTCCACGTGGATGGGGGACAGAGTCGTCACCAAGT |
| | | | CCACCCGAACCTGGGTGCTGCCCAGCTACAACAACCACCAGTACCGAGAG |
| | | | ATCAAAAGCGGCTCCGTCGACGGAAGCAACGCCAACGCCTACTTTGGATA |
| | | | CAGCACCCCCTGGGGGTACTTTGACTTTAACCGCTTCCACAGCCACTGGA |
| | | | GCCCCCGAGACTGGCAAAGACTCATCAACAACTACTGGGGCTTCAGACCC |
| | | | CGGTCCCTCAGAGTCAAAATCTTCAACATTCAAGTCAAAGAGGTCACGGT |
| | | | GCAGGACTCCACCACCACCATCGCCAACAACCTCACCTCCACCGTCCAAG |
| | | | TGTTTACGGACGACGACTACCAGCTGCCCTACGTCGTCGGCAACGGGACC |
| | | | GAGGGATGCCTGCCGGCCTTCCCTCCGCAGGTCTTTACGCTGCCGCAGTA |
| | | | CGGTTACGCGACGCTGAACCGCGACAACACAGAAAATCCCACCGAGAGGA |
| | | | GCAGCTTCTTCTGCCTAGAGTACTTTCCCAGCAAGATGCTGAGAACGGGC |
| | | | AACAACTTTGAGTTTACCTACAACTTTGAGGAGGTGCCCTTCCACTCCAG |
| | | | CTTCGCTCCCAGTCAGAACCTGTTCAAGCTGGCCAACCCGCTGGTGGACC |
| | | | AGTACTTGTACCGCTTCGTGAGCACAAATAACACTGGCGGAGTCCAGTTC |
| | | | AACAAGAACCTGGCCGGGAGATACGCCAACACCTACAAAAACTGGTTCCC |
| | | | GGGGCCCATGGGCCGAACCCAGGGCTGGAACCTGGGCTCCGGGGTCAACC |
| | | | GCGCCAGTGTCAGCGCCTTCGCCACGACCAATAGGATGGAGCTCGAGGGC |
| | | | GCGAGTTACCAGGTGCCCCCGCAGCCGAACGGCATGACCAACAACCTCCA |
| | | | GGGCAGCAACACCTATGCCCTGGAGAACACTATGATCTTCAACAGCCAGC |
| | | | CGGCGAACCCGGGCACCACCGCCACGTACCTCGAGGGCAACATGCTCATC |
| | | | ACCAGCGAGAGCGAGACACAGCCGGTGAACCGCGTGGCGTACAACGTCGG |
| | | | CGGGCAGATGGCCACCAACAACCAGAGCTCCACCACTGCCCCCGCGACCG |
| | | | GCACGTACAACCTCCAGGAAATCGTGCCCGGCAGCGTGTGGATGGAGAGG |
| | | | GACGTGTACCTCCAAGGACCCATCTGGGCCAAGATCCCAGAGACAGGGGC |
| | | | GCACTTTCACCCCTCTCCGGCCATGGGCGGATTCGGACTCAAACACCCAC |
| | | | CGCCCATGATGCTCATCAAGAACACGCCTGTGCCCGGAAATATCACCAGC |
| | | | TTCTCGGACGTGCCCGTCAGCAGCTTCATCACCCAGTACAGCACCGGGCA |
| | | | GGTCACCGTGGAGATGGAGTGGGAGCTCAAGAAGGAAAACTCCAAGAGGT |
| | | | GGAACCCAGAGATCCAGTACACAAACAACTACAACGACCCCCAGTTTGTG |
| | | | GACTTTGCCCCGGACAGCACCGGGGAATACAGAACCACCAGACCTATCGG |
| | | | AACCCGATACCTTACCCGACCCCTTTAA |
| 27 | 7 | MAAP_aa | MSKPVVLCCLVITISDPETGSIEESLSTRQTRSRESTTSRTTSSLRRETT |
| | | | PTSSTTTRTPSFRRSSPTTHPSGETSERQSFRPRKGFSNLLAWLKRVLRR |
| | | | PLPESG* |
| 28 | 7 | MAAP_nt | ATGAGCAAGCCCGTGGTCTTGTGCTGCCTGGTTATAACTATCTCGGACCC |
| | | | GGAAACGGGCTCGATCGAGGAGAGCCTGTCAACGAGGCAGACGAGGTCGC |
| | | | GCGAGAGCACGACATCTCGTACAACGAGCAGCTTGAGGCGGGAGACAACC |
| | | | CCTACCTCAAGTACAACCACGCGGACGCCGAGTTTCAGGAGAAGCTCGCC |
| | | | GACGACACATCCTTCGGGGGAAACCTCGGAAAGGCAGTCTTTCAGGCCAA |
| | | | GAAAAGGGTTCTCGAACCTTTTGGCCTGGTTGAAGAGGGTGCTAAGACGG |
| | | | CCCCTACCGGAAAGCGGATAG |
| 29 | 8 | VP1_aa | MSFVDHPPDWLEEVGEGLFEFYGLEAGFPKPKPNQQHQDQARGLVLPGYN |
| | | | YLGPGNGLDRGEPVNRADEVAREHDISYNEQLEAGDNPYLKYNHADAEFQ |
| | | | EKLADDTSFGGNLGKAVFQAKKRVLEPFGLVEEGAKTAPTGKRIDDHFPK |
| | | | RKKARTEEDSKPSTSSDAEAGPSGSQQLQIPAQPASSLGADTMSAGGGGP |
| | | | LGDNNQGADGVGNASGDWHCDSTWMGDRVVTKSTRTWVLPSYNNHQYREI |
| | | | KSGSVDGSNANAYFGYSTPWGYFDFNRFHSHWSPRDWQRLINNYWGFRPR |
| | | | SLRVKIFNIQVKEVTVQDSTTTIANNLTSTVQVFTDDDYQLPYVVGNGTE |
| | | | GCLPAFPPQVFTLPQYGYATLNRDNTENPTERSSFFCLEYFPSKMLRTGN |
| | | | NFEFTYNFEEVPFHSSFAPSQNLFKLANPLVDQYLYRFVSTNNTGGVQFN |
| | | | KNLAGRYANTYKNWFPGPMGRTQGWNLGSGVNRASVSAFATTNRMELEGA |
| | | | SYQVPPQPNGMTNNLQGSNTYALENTMIFNSQPANPGTTATYLEGNMLIT |
| | | | SESETQPVNRVAYNVGGQMATNNQSSTTAPATGTYNLQEIVPGSVWMERD |
| | | | VYLQGPIWAKIPETGAHFHPSPAMGGFGLKHPPPMMLIKNTPVPGNITSF |
| | | | SDVPVSSFITQYSTGQVTVEMEWELKKENSKRWNPEIQYTNNYNDPQFVD |
| | | | FAPDSTGEYRTTRPIGTRYLTRPL* |
| 30 | 8 | VP1_nt | ATGTCTTTTGTTGATCACCCTCCAGATTGGTTGGAAGAAGTTGGTGAAGG |
| | | | TCTTTTCGAGTTTTATGGCCTTGAAGCGGGCTTTCCGAAACCAAAACCCA |
| | | | ATCAGCAGCATCAAGATCAAGCCCGTGGTCTTGTGCTGCCTGGTTATAAC |
| | | | TATCTCGGACCCGGAAACGGGCTCGATCGAGGAGAGCCTGTCAACAGGGC |
| | | | AGACGAGGTCGCGCGAGAGCACGACATCTCGTACAACGAGCAGCTTGAGG |
| | | | CGGGAGACAACCCCTACCTCAAGTACAACCACGCGGACGCCGAGTTTCAG |
| | | | GAGAAGCTCGCCGACGACACATCCTTCGGGGGAAACCTCGGAAAGGCAGT |
| | | | CTTTCAGGCCAAGAAAAGGGTTCTCGAACCTTTTGGCCTGGTTGAAGAGG |
| | | | GTGCTAAGACGGCCCCTACCGGAAAGCGGATAGACGACCACTTTCCAAAA |
| | | | AGAAAGAAGGCTCGGACCGAAGAGGACTCCAAGCCTTCCACCTCGTCAGA |
| | | | CGCCGAAGCTGGACCCAGCGGATCCCAGCAGCTGCAAATCCCAGCCCAAC |
| | | | CAGCCTCAAGTTTGGGAGCTGATACAATGTCTGCGGGAGGTGGCGGCCCA |
| | | | TTGGGCGACAATAACCAAGGTGCCGATGGAGTGGGCAATGCCTCGGGAGA |
| | | | TTGGCATTGCGATTCCACGTGGATGGGGGACAGAGTCGTCACCAAGTCCA |
| | | | CCCGAACCTGGGTGCTGCCCAGCTACAACAACCACCAGTACCGAGAGATC |
| | | | AAAAGCGGCTCCGTCGACGGAAGCAACGCCAACGCCTACTTTGGATACAG |
| | | | CACCCCCTGGGGGTACTTTGACTTTAACCGCTTCCACAGCCACTGGAGCC |
| | | | CCCGAGACTGGCAAAGACTCATCAACAACTACTGGGGCTTCAGACCCCGG |
| | | | TCCCTCAGAGTCAAAATCTTCAACATTCAAGTCAAAGAGGTCACGGTGCA |
| | | | GGACTCCACCACCACCATCGCCAACAACCTCACCTCCACCGTCCAAGTGT |
| | | | TTACGGACGACGACTACCAGCTGCCCTACGTCGTCGGCAACGGGACCGAG |
| | | | GGATGCCTGCCGGCCTTCCCTCCGCAGGTCTTTACGCTGCCGCAGTACGG |
| | | | TTACGCGACGCTGAACCGCGACAACACAGAAAATCCCACCGAGAGGAGCA |
| | | | GCTTCTTCTGCCTAGAGTACTTTCCCAGCAAGATGCTGAGAACGGGCAAC |
| | | | AACTTTGAGTTTACCTACAACTTTGAGGAGGTGCCCTTCCACTCCAGCTT |
| | | | CGCTCCCAGTCAGAACCTGTTCAAGCTGGCCAACCCGCTGGTGGACCAGT |
| | | | ACTTGTACCGCTTCGTGAGCACAAATAACACTGGCGGAGTCCAGTTCAAC |
| | | | AAGAACCTGGCCGGGAGATACGCCAACACCTACAAAAACTGGTTCCCGGG |
| | | | GCCCATGGGCCGAACCCAGGGCTGGAACCTGGGCTCCGGGGTCAACCGCG |
| | | | CCAGTGTCAGCGCCTTCGCCACGACCAATAGGATGGAGCTCGAGGGCGCG |
| | | | AGTTACCAGGTGCCCCCGCAGCCGAACGGCATGACCAACAACCTCCAGGG |
| | | | CAGCAACACCTATGCCCTGGAGAACACTATGATCTTCAACAGCCAGCCGG |
| | | | CGAACCCGGGCACCACCGCCACGTACCTCGAGGGCAACATGCTCATCACC |
| | | | AGCGAGAGCGAGACACAGCCGGTGAACCGCGTGGCGTACAACGTCGGCGG |
| | | | GCAGATGGCCACCAACAACCAGAGCTCCACCACTGCCCCCGCGACCGGCA |
| | | | CGTACAACCTCCAGGAAATCGTGCCCGGCAGCGTGTGGATGGAGAGGGAC |
| | | | GTGTACCTCCAAGGACCCATCTGGGCCAAGATCCCAGAGACAGGGGCGCA |
| | | | CTTTCACCCCTCTCCGGCCATGGGCGGATTCGGACTCAAACACCCACCGC |
| | | | CCATGATGCTCATCAAGAACACGCCTGTGCCCGGAAATATCACCAGCTTC |
| | | | TCGGACGTGCCCGTCAGCAGCTTCATCACCCAGTACAGCACCGGGCAGGT |
| | | | CACCGTGGAGATGGAGTGGGAGCTCAAGAAGGAAAACTCCAAGAGGTGGA |
| | | | ACCCAGAGATCCAGTACACAAACAACTACAACGACCCCCAGTTTGTGGAC |
| | | | TTTGCCCCGGACAGCACCGGGGAATACAGAACCACCAGACCTATCGGAAC |
| | | | CCGATACCTTACCCGACCCCTTTAA |
| 31 | 8 | MAAP_aa | MALKRAFRNQNPISSIKIKPVVLCCLVITISDPETGSIEESLSTGQTRSR |
| | | | ESTTSRTTSSLRRETTPTSSTTTRTPSFRRSSPTTHPSGETSERQSFRPR |
| | | | KGFSNLLAWLKRVLRRPLPESG* |
| 32 | 8 | MAAP_nt | ATGGCCTTGAAGCGGGCTTTCCGAAACCAAAACCCAATCAGCAGCATCAA |
| | | | GATCAAGCCCGTGGTCTTGTGCTGCCTGGTTATAACTATCTCGGACCCGG |
| | | | AAACGGGCTCGATCGAGGAGAGCCTGTCAACAGGGCAGACGAGGTCGCGC |
| | | | GAGAGCACGACATCTCGTACAACGAGCAGCTTGAGGCGGGAGACAACCCC |
| | | | TACCTCAAGTACAACCACGCGGACGCCGAGTTTCAGGAGAAGCTCGCCGA |
| | | | CGACACATCCTTCGGGGGAAACCTCGGAAAGGCAGTCTTTCAGGCCAAGA |
| | | | AAAGGGTTCTCGAACCTTTTGGCCTGGTTGAAGAGGGTGCTAAGACGGCC |
| | | | CCTACCGGAAAGCGGATAG |
| 33 | 9 | VP1_aa | MSFVDHPPDWLEEVGEGLREFLGLEAGPPKPKPNQQHQDQARGLVLPGYN |
| | | | YLGPGNGLDRGEPVNRADEVAREHDISYNEQLDAGDNPYLKYNHADAEFQ |
| | | | EKLADDTSFGGNLGKAVFQAKKRVLEPFGLVEEGAKTAPTGKRIDDHFPK |
| | | | RKKARTEEDSKPSTSSDAEAGPSGSQQLQIPAQPASSLGADTMSAGGGGP |
| | | | LGDNNQGADGVGNASGDWHCDSTWMGDRVVTKSTRTWVLPSYNNHQYREI |
| | | | KSGSVDGSNANAYFGYSTPWGYFDFNRFHSHWSPRDWQRLINNYWGFRPR |
| | | | SLRVKIFNIQVKEVTVQDSTTTIANNLTSTVQVFTDDDYQLPYVVGNGTE |
| | | | GCLPAFPPQVFTLPQYGYATLNRDNTENPTERSSFFCLEYFPSKMLRTGN |
| | | | NFEFTYNFEEVPFHSSFAPSQNLFKLANPLVDQYLYRFVSTNNTGGVQFN |
| | | | KNLAGRYANTYKNWFPGPMGRTQGWNLGSGVNRASVSAFATTNRMELEGA |
| | | | SYQVPPQPNGMTNNLQGSNTYALENTMIFNSQPANPGTTATYLEGNMLIT |
| | | | SESETQPVNRVAYNVGGQMATNNQSSTTAPATGTYNLQEIVPGSVWMERD |
| | | | VYLQGPIWAKIPETGAHFHPSPAMGGFGLKHPPPMMLIKNTPVPGNITSF |
| | | | SDVPVSSFITQYSTGQVTVEMEWELKKENSKRWNPEIQYTNNYNDPQFVD |
| | | | FAPDSTGEYRTTRPIGTRYLTRPL* |
| 34 | 9 | VP1_nt | ATGTCTTTTGTTGATCACCCTCCAGATTGGTTGGAAGAAGTTGGTGAAGG |
| | | | TCTTCGCGAGTTTTTGGGCCTTGAAGCGGGCCCACCGAAACCAAAACCCA |
| | | | ATCAGCAGCATCAAGATCAAGCCCGTGGTCTTGTGCTGCCTGGTTATAAC |
| | | | TATCTCGGACCCGGAAACGGGCTCGATCGAGGAGAGCCTGTCAACAGGGC |
| | | | AGACGAGGTCGCGCGAGAGCACGACATCTCGTACAACGAGCAGCTTGATG |
| | | | CGGGAGACAACCCCTACCTCAAGTACAACCACGCGGACGCCGAGTTTCAG |
| | | | GAGAAGCTCGCCGACGACACATCCTTCGGGGGAAACCTCGGAAAGGCAGT |
| | | | CTTTCAGGCCAAGAAAAGGGTTCTCGAACCTTTTGGCCTGGTTGAAGAGG |
| | | | GTGCTAAGACGGCCCCTACCGGAAAGCGGATAGACGACCACTTTCCAAAA |
| | | | AGAAAGAAGGCTCGGACCGAAGAGGACTCCAAGCCTTCCACCTCGTCAGA |
| | | | CGCCGAAGCTGGACCCAGCGGATCCCAGCAGCTGCAAATCCCAGCCCAAC |
| | | | CAGCCTCAAGTTTGGGAGCTGATACAATGTCTGCGGGAGGTGGCGGCCCA |
| | | | TTGGGCGACAATAACCAAGGTGCCGATGGAGTGGGCAATGCCTCGGGAGA |
| | | | TTGGCATTGCGATTCCACGTGGATGGGGGACAGAGTCGTCACCAAGTCCA |
| | | | CCCGAACCTGGGTGCTGCCCAGCTACAACAACCACCAGTACCGAGAGATC |
| | | | AAAAGCGGCTCCGTCGACGGAAGCAACGCCAACGCCTACTTTGGATACAG |
| | | | CACCCCCTGGGGGTACTTTGACTTTAACCGCTTCCACAGCCACTGGAGCC |
| | | | CCCGAGACTGGCAAAGACTCATCAACAACTACTGGGGCTTCAGACCCCGG |
| | | | TCCCTCAGAGTCAAAATCTTCAACATTCAAGTCAAAGAGGTCACGGTGCA |
| | | | GGACTCCACCACCACCATCGCCAACAACCTCACCTCCACCGTCCAAGTGT |
| | | | TTACGGACGACGACTACCAGCTGCCCTACGTCGTCGGCAACGGGACCGAG |
| | | | GGATGCCTGCCGGCCTTCCCTCCGCAGGTCTTTACGCTGCCGCAGTACGG |
| | | | TTACGCGACGCTGAACCGCGACAACACAGAAAATCCCACCGAGAGGAGCA |
| | | | GCTTCTTCTGCCTAGAGTACTTTCCCAGCAAGATGCTGAGAACGGGCAAC |
| | | | AACTTTGAGTTTACCTACAACTTTGAGGAGGTGCCCTTCCACTCCAGCTT |
| | | | CGCTCCCAGTCAGAACCTGTTCAAGCTGGCCAACCCGCTGGTGGACCAGT |
| | | | ACTTGTACCGCTTCGTGAGCACAAATAACACTGGCGGAGTCCAGTTCAAC |
| | | | AAGAACCTGGCCGGGAGATACGCCAACACCTACAAAAACTGGTTCCCGGG |
| | | | GCCCATGGGCCGAACCCAGGGCTGGAACCTGGGCTCCGGGGTCAACCGCG |
| | | | CCAGTGTCAGCGCCTTCGCCACGACCAATAGGATGGAGCTCGAGGGCGCG |
| | | | AGTTACCAGGTGCCCCCGCAGCCGAACGGCATGACCAACAACCTCCAGGG |
| | | | CAGCAACACCTATGCCCTGGAGAACACTATGATCTTCAACAGCCAGCCGG |
| | | | CGAACCCGGGCACCACCGCCACGTACCTCGAGGGCAACATGCTCATCACC |
| | | | AGCGAGAGCGAGACACAGCCGGTGAACCGCGTGGCGTACAACGTCGGCGG |
| | | | GCAGATGGCCACCAACAACCAGAGCTCCACCACTGCCCCCGCGACCGGCA |
| | | | CGTACAACCTCCAGGAAATCGTGCCCGGCAGCGTGTGGATGGAGAGGGAC |
| | | | GTGTACCTCCAAGGACCCATCTGGGCCAAGATCCCAGAGACAGGGGCGCA |
| | | | CTTTCACCCCTCTCCGGCCATGGGCGGATTCGGACTCAAACACCCACCGC |
| | | | CCATGATGCTCATCAAGAACACGCCTGTGCCCGGAAATATCACCAGCTTC |
| | | | TCGGACGTGCCCGTCAGCAGCTTCATCACCCAGTACAGCACCGGGCAGGT |
| | | | CACCGTGGAGATGGAGTGGGAGCTCAAGAAGGAAAACTCCAAGAGGTGGA |
| | | | ACCCAGAGATCCAGTACACAAACAACTACAACGACCCCCAGTTTGTGGAC |
| | | | TTTGCCCCGGACAGCACCGGGGAATACAGAACCACCAGACCTATCGGAAC |
| | | | CCGATACCTTACCCGACCCCTTTAA |
| 35 | 9 | MAAP_aa | MRETTPTSSTTTRTPSFRRSSPTTHPSGETSERQSFRPRKGFSNLLAWLK |
| | | | RVLRRPLPESG* |
| 36 | 9 | MAAP_nt | ATGCGGGAGACAACCCCTACCTCAAGTACAACCACGCGGACGCCGAGTTT |
| | | | CAGGAGAAGCTCGCCGACGACACATCCTTCGGGGGAAACCTCGGAAAGGC |
| | | | AGTCTTTCAGGCCAAGAAAAGGGTTCTCGAACCTTTTGGCCTGGTTGAAG |
| | | | AGGGTGCTAAGACGGCCCCTACCGGAAAGCGGATAG |
| 37 | 10 | VP1_aa | MSFVDHPPDWLEEVGEGLREFLGLEAGPPKPKPNQQHQDNGRGLVLPGYK |
| | | | YLGPFNGLDKGEPVNEADEVAREHDISYNEQLEAGDNPYLKYNHADAEFQ |
| | | | EKLADDTSFGGNLGKAVFQAKKRVLEPFGLVEEGAKTAPTGKRIDDHFPK |
| | | | RKKARTEEDSKPSTSSDAEAGPSGSQQLQIPAQPASSLGADTMSAGGGGP |
| | | | LGDNNQGADGVGNASGDWHCDSTWMGDRVVTKSTRTWVLPSYNNHQYREI |
| | | | KSGSVDGSNANAYFGYSTPWGYFDFNRFHSHWSPRDWQRLINNYWGFRPR |
| | | | SLRVKIFNIQVKEVTVQDSTTTIANNLTSTVQVFTDDDYQLPYVVGNGTE |
| | | | GCLPAFPPQVFTLPQYGYATLNRDNTENPTERSSFFCLEYFPSKMLRTGN |
| | | | NFEFTYNFEEVPFHSSFAPSQNLFKLANPLVDQYLYRFVSTNNTGGVQFN |
| | | | KNLAGRYANTYKNWFPGPMGRTQGWNLGSGVNRASVSAFATTNRMELEGA |
| | | | SYQVPPQPNGMTNNLQGSNTYALENTMIFNSQPANPGTTATYLEGNMLIT |
| | | | SESETQPVNRVAYNVGGQMATNNQSSTTAPATGTYNLQEIVPGSVWMERD |
| | | | VYLQGPIWAKIPETGAHFHPSPAMGGFGLKHPPPMMLIKNTPVPGNITSF |
| | | | SDVPVSSFITQYSTGQVTVEMEWELKKENSKRWNPEIQYTNNYNDPQFVD |
| | | | FAPDSTGEYRTTRPIGTRYLTRPL* |
| 38 | 10 | VP1_nt | ATGTCTTTTGTTGATCACCCTCCAGATTGGTTGGAAGAAGTTGGTGAAGG |
| | | | TCTTCGCGAGTTTTTGGGCCTTGAAGCGGGCCCACCGAAACCAAAACCCA |
| | | | ATCAGCAGCATCAAGATAATGGACGTGGTCTTGTGCTGCCTGGTTATAAA |
| | | | TATCTCGGACCCTTCAACGGGCTCGATAAGGGAGAGCCTGTCAACGAAGC |
| | | | AGACGAGGTCGCGCGAGAGCACGACATCTCGTACAACGAGCAGCTTGAGG |
| | | | CGGGAGACAACCCCTACCTCAAGTACAACCACGCGGACGCCGAGTTTCAG |
| | | | GAGAAGCTCGCCGACGACACATCCTTCGGGGGAAACCTCGGAAAGGCAGT |
| | | | CTTTCAGGCCAAGAAAAGGGTTCTCGAACCTTTTGGCCTGGTTGAAGAGG |
| | | | GTGCTAAGACGGCCCCTACCGGAAAGCGGATAGACGACCACTTTCCAAAA |
| | | | AGAAAGAAGGCTCGGACCGAAGAGGACTCCAAGCCTTCCACCTCGTCAGA |
| | | | CGCCGAAGCTGGACCCAGCGGATCCCAGCAGCTGCAAATCCCAGCCCAAC |
| | | | CAGCCTCAAGTTTGGGAGCTGATACAATGTCTGCGGGAGGTGGCGGCCCA |
| | | | TTGGGCGACAATAACCAAGGTGCCGATGGAGTGGGCAATGCCTCGGGAGA |
| | | | TTGGCATTGCGATTCCACGTGGATGGGGGACAGAGTCGTCACCAAGTCCA |
| | | | CCCGAACCTGGGTGCTGCCCAGCTACAACAACCACCAGTACCGAGAGATC |
| | | | AAAAGCGGCTCCGTCGACGGAAGCAACGCCAACGCCTACTTTGGATACAG |
| | | | CACCCCCTGGGGGTACTTTGACTTTAACCGCTTCCACAGCCACTGGAGCC |
| | | | CCCGAGACTGGCAAAGACTCATCAACAACTACTGGGGCTTCAGACCCCGG |
| | | | TCCCTCAGAGTCAAAATCTTCAACATTCAAGTCAAAGAGGTCACGGTGCA |
| | | | GGACTCCACCACCACCATCGCCAACAACCTCACCTCCACCGTCCAAGTGT |
| | | | TTACGGACGACGACTACCAGCTGCCCTACGTCGTCGGCAACGGGACCGAG |
| | | | GGATGCCTGCCGGCCTTCCCTCCGCAGGTCTTTACGCTGCCGCAGTACGG |
| | | | TTACGCGACGCTGAACCGCGACAACACAGAAAATCCCACCGAGAGGAGCA |
| | | | GCTTCTTCTGCCTAGAGTACTTTCCCAGCAAGATGCTGAGAACGGGCAAC |
| | | | AACTTTGAGTTTACCTACAACTTTGAGGAGGTGCCCTTCCACTCCAGCTT |
| | | | CGCTCCCAGTCAGAACCTGTTCAAGCTGGCCAACCCGCTGGTGGACCAGT |
| | | | ACTTGTACCGCTTCGTGAGCACAAATAACACTGGCGGAGTCCAGTTCAAC |
| | | | AAGAACCTGGCCGGGAGATACGCCAACACCTACAAAAACTGGTTCCCGGG |
| | | | GCCCATGGGCCGAACCCAGGGCTGGAACCTGGGCTCCGGGGTCAACCGCG |
| | | | CCAGTGTCAGCGCCTTCGCCACGACCAATAGGATGGAGCTCGAGGGCGCG |
| | | | AGTTACCAGGTGCCCCCGCAGCCGAACGGCATGACCAACAACCTCCAGGG |
| | | | CAGCAACACCTATGCCCTGGAGAACACTATGATCTTCAACAGCCAGCCGG |
| | | | CGAACCCGGGCACCACCGCCACGTACCTCGAGGGCAACATGCTCATCACC |
| | | | AGCGAGAGCGAGACACAGCCGGTGAACCGCGTGGCGTACAACGTCGGCGG |
| | | | GCAGATGGCCACCAACAACCAGAGCTCCACCACTGCCCCCGCGACCGGCA |
| | | | CGTACAACCTCCAGGAAATCGTGCCCGGCAGCGTGTGGATGGAGAGGGAC |
| | | | GTGTACCTCCAAGGACCCATCTGGGCCAAGATCCCAGAGACAGGGGCGCA |
| | | | CTTTCACCCCTCTCCGGCCATGGGCGGATTCGGACTCAAACACCCACCGC |
| | | | CCATGATGCTCATCAAGAACACGCCTGTGCCCGGAAATATCACCAGCTTC |
| | | | TCGGACGTGCCCGTCAGCAGCTTCATCACCCAGTACAGCACCGGGCAGGT |
| | | | CACCGTGGAGATGGAGTGGGAGCTCAAGAAGGAAAACTCCAAGAGGTGGA |
| | | | ACCCAGAGATCCAGTACACAAACAACTACAACGACCCCCAGTTTGTGGAC |
| | | | TTTGCCCCGGACAGCACCGGGGAATACAGAACCACCAGACCTATCGGAAC |
| | | | CCGATACCTTACCCGACCCCTTTAA |
| 39 | 10 | MAAP_aa | MDVVLCCLVINISDPSTGSIRESLSTKQTRSRESTTSRTTSSLRRETTPT |
| | | | SSTTTRTPSFRRSSPTTHPSGETSERQSFRPRKGFSNLLAWLKRVLRRPL |
| | | | PESG* |
| 40 | 10 | MAAP_nt | ATGGACGTGGTCTTGTGCTGCCTGGTTATAAATATCTCGGACCCTTCAAC |
| | | | GGGCTCGATAAGGGAGAGCCTGTCAACGAAGCAGACGAGGTCGCGCGAGA |
| | | | GCACGACATCTCGTACAACGAGCAGCTTGAGGCGGGAGACAACCCCTACC |
| | | | TCAAGTACAACCACGCGGACGCCGAGTTTCAGGAGAAGCTCGCCGACGAC |
| | | | ACATCCTTCGGGGGAAACCTCGGAAAGGCAGTCTTTCAGGCCAAGAAAAG |
| | | | GGTTCTCGAACCTTTTGGCCTGGTTGAAGAGGGTGCTAAGACGGCCCCTA |
| | | | CCGGAAAGCGGATAG |
| 41 | 11 | VP1_aa | MSFVDHPPDWLEEVGEGLREFLGLEAGPPKPKPNEQQHQDQARGLVLPGY |
| | | | NYLGPGNGLDRGEPVNRADEVAREHDISYNEQLEAGDNPYLKYNHADAEF |
| | | | QEKLADDTSFGGNLGKAVFQAKKRVLEPFGLVEEGAKTAPTGKRIDDHFP |
| | | | KRKKARTEEDSKPSTSSDAEAGPSGSQQLQIPAQPASSLGADTMSAGGGG |
| | | | PLGDNNQGADGVGNASGDWHCDSTWMGDRVVTKSTRTWVLPSYNNHQYRE |
| | | | IKSGSVDGSNANAYFGYSTPWGYFDFNRFHSHWSPRDWQRLINNYWGFRP |
| | | | RSLRVKIFNIQVKEVTVQDSTTTIANNLISTVQVFTDDDYQLPYVVGNGT |
| | | | EGCLPAFPPQVFTLPQYGYATLNRDNTENPTERSSFFCLEYFPSKMLRTG |
| | | | NNFEFTYNFEEVPFHSSFAPSQNLFKLANPLVDQYLYRFVSTNNTGGVQF |
| | | | NKNLAGRYANTYKNWFPGPMGRTQGWNLGSGVNRASVSAFATTNRMELEG |
| | | | ASYQVPPQPNGMTNNLQGSNTYALENTMIFNSQPANPGTTATYLEGNMLI |
| | | | TSESETQPVNRVAYNVGGQMATNNQSSTTAPATGTYNLQEIVPGSVWMER |
| | | | DVYLQGPIWAKIPETGAHFHPSPAMGGFGLKHPPPMMLIKNTPVPGNITS |
| | | | FSDVPVSSFITQYSTGQVTVEMEWELKKENSKRWNPEIQYTNNYNDPQFV |
| | | | DFAPDSTGEYRTTRPIGTRYLTRPL* |
| 42 | 11 | VP1_nt | ATGTCTTTTGTTGATCACCCTCCAGATTGGTTGGAAGAAGTTGGTGAAGG |
| | | | TCTTCGCGAGTTTTTGGGCCTTGAAGCGGGCCCACCGAAACCAAAACCCA |
| | | | ATGAGCAGCAGCATCAAGATCAAGCCCGTGGTCTTGTGCTGCCTGGTTAT |
| | | | AACTATCTCGGACCCGGAAACGGGCTCGATCGAGGAGAGCCTGTCAACAG |
| | | | GGCAGACGAGGTCGCGCGAGAGCACGACATCTCGTACAACGAGCAGCTTG |
| | | | AGGCGGGAGACAACCCCTACCTCAAGTACAACCACGCGGACGCCGAGTTT |
| | | | CAGGAGAAGCTCGCCGACGACACATCCTTCGGGGGAAACCTCGGAAAGGC |
| | | | AGTCTTTCAGGCCAAGAAAAGGGTTCTCGAACCTTTTGGCCTGGTTGAAG |
| | | | AGGGTGCTAAGACGGCCCCTACCGGAAAGCGGATAGACGACCACTTTCCA |
| | | | AAAAGAAAGAAGGCTCGGACCGAAGAGGACTCCAAGCCTTCCACCTCGTC |
| | | | AGACGCCGAAGCTGGACCCAGCGGATCCCAGCAGCTGCAAATCCCAGCCC |
| | | | AACCAGCCTCAAGTTTGGGAGCTGATACAATGTCTGCGGGAGGTGGCGGC |
| | | | CCATTGGGCGACAATAACCAAGGTGCCGATGGAGTGGGCAATGCCTCGGG |
| | | | AGATTGGCATTGCGATTCCACGTGGATGGGGGACAGAGTCGTCACCAAGT |
| | | | CCACCCGAACCTGGGTGCTGCCCAGCTACAACAACCACCAGTACCGAGAG |
| | | | ATCAAAAGCGGCTCCGTCGACGGAAGCAACGCCAACGCCTACTTTGGATA |
| | | | CAGCACCCCCTGGGGGTACTTTGACTTTAACCGCTTCCACAGCCACTGGA |
| | | | GCCCCCGAGACTGGCAAAGACTCATCAACAACTACTGGGGCTTCAGACCC |
| | | | CGGTCCCTCAGAGTCAAAATCTTCAACATTCAAGTCAAAGAGGTCACGGT |
| | | | GCAGGACTCCACCACCACCATCGCCAACAACCTCACCTCCACCGTCCAAG |
| | | | TGTTTACGGACGACGACTACCAGCTGCCCTACGTCGTCGGCAACGGGACC |
| | | | GAGGGATGCCTGCCGGCCTTCCCTCCGCAGGTCTTTACGCTGCCGCAGTA |
| | | | CGGTTACGCGACGCTGAACCGCGACAACACAGAAAATCCCACCGAGAGGA |
| | | | GCAGCTTCTTCTGCCTAGAGTACTTTCCCAGCAAGATGCTGAGAACGGGC |
| | | | AACAACTTTGAGTTTACCTACAACTTTGAGGAGGTGCCCTTCCACTCCAG |
| | | | CTTCGCTCCCAGTCAGAACCTGTTCAAGCTGGCCAACCCGCTGGTGGACC |
| | | | AGTACTTGTACCGCTTCGTGAGCACAAATAACACTGGCGGAGTCCAGTTC |
| | | | AACAAGAACCTGGCCGGGAGATACGCCAACACCTACAAAAACTGGTTCCC |
| | | | GGGGCCCATGGGCCGAACCCAGGGCTGGAACCTGGGCTCCGGGGTCAACC |
| | | | GCGCCAGTGTCAGCGCCTTCGCCACGACCAATAGGATGGAGCTCGAGGGC |
| | | | GCGAGTTACCAGGTGCCCCCGCAGCCGAACGGCATGACCAACAACCTCCA |
| | | | GGGCAGCAACACCTATGCCCTGGAGAACACTATGATCTTCAACAGCCAGC |
| | | | CGGCGAACCCGGGCACCACCGCCACGTACCTCGAGGGCAACATGCTCATC |
| | | | ACCAGCGAGAGCGAGACACAGCCGGTGAACCGCGTGGCGTACAACGTCGG |
| | | | CGGGCAGATGGCCACCAACAACCAGAGCTCCACCACTGCCCCCGCGACCG |
| | | | GCACGTACAACCTCCAGGAAATCGTGCCCGGCAGCGTGTGGATGGAGAGG |
| | | | GACGTGTACCTCCAAGGACCCATCTGGGCCAAGATCCCAGAGACAGGGGC |
| | | | GCACTTTCACCCCTCTCCGGCCATGGGCGGATTCGGACTCAAACACCCAC |
| | | | CGCCCATGATGCTCATCAAGAACACGCCTGTGCCCGGAAATATCACCAGC |
| | | | TTCTCGGACGTGCCCGTCAGCAGCTTCATCACCCAGTACAGCACCGGGCA |
| | | | GGTCACCGTGGAGATGGAGTGGGAGCTCAAGAAGGAAAACTCCAAGAGGT |
| | | | GGAACCCAGAGATCCAGTACACAAACAACTACAACGACCCCCAGTTTGTG |
| | | | GACTTTGCCCCGGACAGCACCGGGGAATACAGAACCACCAGACCTATCGG |
| | | | AACCCGATACCTTACCCGACCCCTTTAA |
| 43 | 11 | MAAP_aa | MSSSIKIKPVVLCCLVITISDPETGSIEESLSTGQTRSRESTTSRTTSSL |
| | | | RRETTPTSSTTTRTPSFRRSSPTTHPSGETSERQSFRPRKGFSNLLAWLK |
| | | | RVLRRPLPESG* |
| 44 | 11 | MAAP_nt | ATGAGCAGCAGCATCAAGATCAAGCCCGTGGTCTTGTGCTGCCTGGTTAT |
| | | | AACTATCTCGGACCCGGAAACGGGCTCGATCGAGGAGAGCCTGTCAACAG |
| | | | GGCAGACGAGGTCGCGCGAGAGCACGACATCTCGTACAACGAGCAGCTTG |
| | | | AGGCGGGAGACAACCCCTACCTCAAGTACAACCACGCGGACGCCGAGTTT |
| | | | CAGGAGAAGCTCGCCGACGACACATCCTTCGGGGGAAACCTCGGAAAGGC |
| | | | AGTCTTTCAGGCCAAGAAAAGGGTTCTCGAACCTTTTGGCCTGGTTGAAG |
| | | | AGGGTGCTAAGACGGCCCCTACCGGAAAGCGGATAG |
| 45 | 12 | VP1_aa | MSFVDHPPDWLEEVGDGLRLFLGLEAGPPKPKPNQQHQDQARGLVLPGYN |
| | | | YLGPGNGLDRGEPVNRADEVAREHDISYNEQLEAGDNPYLKYNHADAEFQ |
| | | | EKLADDTSFGGNLGKAVFQAKKRVLEPFGLVEEGAKTAPTGKRIDDHFPK |
| | | | RKKARTEEDSKPSTSSDAEAGPSGSQQLQIPAQPASSLGADTMSAGGGGP |
| | | | LGDNNQGADGVGNASGDWHCDSTWMGDRVVTKSTRTWVLPSYNNHQYREI |
| | | | KSGSVDGSNANAYFGYSTPWGYFDFNRFHSHWSPRDWQRLINNYWGFRPR |
| | | | SLRVKIFNIQVKEVTVQDSTTTIANNLTSTVQVFTDDDYQLPYVVGNGTE |
| | | | GCLPAFPPQVFTLPQYGYATLNRDNTENPTERSSFFCLEYFPSKMLRTGN |
| | | | NFEFTYNFEEVPFHSSFAPSQNLFKLANPLVDQYLYRFVSTNNTGGVQFN |
| | | | KNLAGRYANTYKNWFPGPMGRTQGWNLGSGVNRASVSAFATTNRMELEGA |
| | | | SYQVPPQPNGMTNNLQGSNTYALENTMIFNSQPANPGTTATYLEGNMLIT |
| | | | SESETQPVNRVAYNVGGQMATNNQSSTTAPATGTYNLQEIVPGSVWMERD |
| | | | VYLQGPIWAKIPETGAHFHPSPAMGGFGLKHPPPMMLIKNTPVPGNITSF |
| | | | SDVPVSSFITQYSTGQVTVEMEWELKKENSKRWNPEIQYTNNYNDPQFVD |
| | | | FAPDSTGEYRTTRPIGTRYLTRPL* |
| 46 | 12 | VP1_nt | ATGTCTTTTGTTGATCACCCTCCAGATTGGTTGGAAGAAGTTGGTGATGG |
| | | | TCTACGCCTGTTTTTGGGCCTTGAAGCGGGCCCACCGAAACCAAAACCCA |
| | | | ATCAGCAGCATCAAGATCAAGCCCGTGGTCTTGTGCTGCCTGGTTATAAC |
| | | | TATCTCGGACCCGGAAACGGGCTCGATCGAGGAGAGCCTGTCAACAGGGC |
| | | | AGACGAGGTCGCGCGAGAGCACGACATCTCGTACAACGAGCAGCTTGAGG |
| | | | CGGGAGACAACCCCTACCTCAAGTACAACCACGCGGACGCCGAGTTTCAG |
| | | | GAGAAGCTCGCCGACGACACATCCTTCGGGGGAAACCTCGGAAAGGCAGT |
| | | | CTTTCAGGCCAAGAAAAGGGTTCTCGAACCTTTTGGCCTGGTTGAAGAGG |
| | | | GTGCTAAGACGGCCCCTACCGGAAAGCGGATAGACGACCACTTTCCAAAA |
| | | | AGAAAGAAGGCTCGGACCGAAGAGGACTCCAAGCCTTCCACCTCGTCAGA |
| | | | CGCCGAAGCTGGACCCAGCGGATCCCAGCAGCTGCAAATCCCAGCCCAAC |
| | | | CAGCCTCAAGTTTGGGAGCTGATACAATGTCTGCGGGAGGTGGCGGCCCA |
| | | | TTGGGCGACAATAACCAAGGTGCCGATGGAGTGGGCAATGCCTCGGGAGA |
| | | | TTGGCATTGCGATTCCACGTGGATGGGGGACAGAGTCGTCACCAAGTCCA |
| | | | CCCGAACCTGGGTGCTGCCCAGCTACAACAACCACCAGTACCGAGAGATC |
| | | | AAAAGCGGCTCCGTCGACGGAAGCAACGCCAACGCCTACTTTGGATACAG |
| | | | CACCCCCTGGGGGTACTTTGACTTTAACCGCTTCCACAGCCACTGGAGCC |
| | | | CCCGAGACTGGCAAAGACTCATCAACAACTACTGGGGCTTCAGACCCCGG |
| | | | TCCCTCAGAGTCAAAATCTTCAACATTCAAGTCAAAGAGGTCACGGTGCA |
| | | | GGACTCCACCACCACCATCGCCAACAACCTCACCTCCACCGTCCAAGTGT |
| | | | TTACGGACGACGACTACCAGCTGCCCTACGTCGTCGGCAACGGGACCGAG |
| | | | GGATGCCTGCCGGCCTTCCCTCCGCAGGTCTTTACGCTGCCGCAGTACGG |
| | | | TTACGCGACGCTGAACCGCGACAACACAGAAAATCCCACCGAGAGGAGCA |
| | | | GCTTCTTCTGCCTAGAGTACTTTCCCAGCAAGATGCTGAGAACGGGCAAC |
| | | | AACTTTGAGTTTACCTACAACTTTGAGGAGGTGCCCTTCCACTCCAGCTT |
| | | | CGCTCCCAGTCAGAACCTGTTCAAGCTGGCCAACCCGCTGGTGGACCAGT |
| | | | ACTTGTACCGCTTCGTGAGCACAAATAACACTGGCGGAGTCCAGTTCAAC |
| | | | AAGAACCTGGCCGGGAGATACGCCAACACCTACAAAAACTGGTTCCCGGG |
| | | | GCCCATGGGCCGAACCCAGGGCTGGAACCTGGGCTCCGGGGTCAACCGCG |
| | | | CCAGTGTCAGCGCCTTCGCCACGACCAATAGGATGGAGCTCGAGGGCGCG |
| | | | AGTTACCAGGTGCCCCCGCAGCCGAACGGCATGACCAACAACCTCCAGGG |
| | | | CAGCAACACCTATGCCCTGGAGAACACTATGATCTTCAACAGCCAGCCGG |
| | | | CGAACCCGGGCACCACCGCCACGTACCTCGAGGGCAACATGCTCATCACC |
| | | | AGCGAGAGCGAGACACAGCCGGTGAACCGCGTGGCGTACAACGTCGGCGG |
| | | | GCAGATGGCCACCAACAACCAGAGCTCCACCACTGCCCCCGCGACCGGCA |
| | | | CGTACAACCTCCAGGAAATCGTGCCCGGCAGCGTGTGGATGGAGAGGGAC |
| | | | GTGTACCTCCAAGGACCCATCTGGGCCAAGATCCCAGAGACAGGGGCGCA |
| | | | CTTTCACCCCTCTCCGGCCATGGGCGGATTCGGACTCAAACACCCACCGC |
| | | | CCATGATGCTCATCAAGAACACGCCTGTGCCCGGAAATATCACCAGCTTC |
| | | | TCGGACGTGCCCGTCAGCAGCTTCATCACCCAGTACAGCACCGGGCAGGT |
| | | | CACCGTGGAGATGGAGTGGGAGCTCAAGAAGGAAAACTCCAAGAGGTGGA |
| | | | ACCCAGAGATCCAGTACACAAACAACTACAACGACCCCCAGTTTGTGGAC |
| | | | TTTGCCCCGGACAGCACCGGGGAATACAGAACCACCAGACCTATCGGAAC |
| | | | CCGATACCTTACCCGACCCCTTTAA |
| 47 | 12 | MAAP_aa | MVYACFWALKRAHRNQNPISSIKIKPVVLCCLVITISDPETGSIEESLST |
| | | | GQTRSRESTTSRTTSSLRRETTPTSSTTTRTPSFRRSSPTTHPSGETSER |
| | | | QSFRPRKGFSNLLAWLKRVLRRPLPESG* |
| 48 | 12 | MAAP_nt | ATGGTCTACGCCTGTTTTTGGGCCTTGAAGCGGGCCCACCGAAACCAAAA |
| | | | CCCAATCAGCAGCATCAAGATCAAGCCCGTGGTCTTGTGCTGCCTGGTTA |
| | | | TAACTATCTCGGACCCGGAAACGGGCTCGATCGAGGAGAGCCTGTCAACA |
| | | | GGGCAGACGAGGTCGCGCGAGAGCACGACATCTCGTACAACGAGCAGCTT |
| | | | GAGGCGGGAGACAACCCCTACCTCAAGTACAACCACGCGGACGCCGAGTT |
| | | | TCAGGAGAAGCTCGCCGACGACACATCCTTCGGGGGAAACCTCGGAAAGG |
| | | | CAGTCTTTCAGGCCAAGAAAAGGGTTCTCGAACCTTTTGGCCTGGTTGAA |
| | | | GAGGGTGCTAAGACGGCCCCTACCGGAAAGCGGATAG |
| 49 | 13 | VP1_aa | MSFVDHPPDWLNEVGEGLREFLGLEAGPPKPKPNQQHQDQARGLVLPGYN |
| | | | YLGPGNGLDRGEPVNRADEVAREHDISYNEQLEAGDNPYLKYNHADAEFQ |
| | | | EKLADDTSFGGNLGKAVFQAKKRVLEPFGLVEEGAKTAPTGKRIDDHFPK |
| | | | RKKARTEEDSKPSTSSDAEAGPSGSQQLQIPAQPASSLGADTMSAGGGGP |
| | | | LGDNNQGADGVGNASGDWHCDSTWMGDRVVTKSTRTWVLPSYNNHQYREI |
| | | | KSGSVDGSNANAYFGYSTPWGYFDFNRFHSHWSPRDWQRLINNYWGFRPR |
| | | | SLRVKIFNIQVKEVTVQDSTTTIANNLTSTVQVFTDDDYQLPYVVGNGTE |
| | | | GCLPAFPPQVFTLPQYGYATLNRDNTENPTERSSFFCLEYFPSKMLRTGN |
| | | | NFEFTYNFEEVPFHSSFAPSQNLFKLANPLVDQYLYRFVSTNNTGGVQFN |
| | | | KNLAGRYANTYKNWFPGPMGRTQGWNLGSGVNRASVSAFATTNRMELEGA |
| | | | SYQVPPQPNGMTNNLQGSNTYALENTMIFNSQPANPGTTATYLEGNMLIT |
| | | | SESETQPVNRVAYNVGGQMATNNQSSTTAPATGTYNLQEIVPGSVWMERD |
| | | | VYLQGPIWAKIPETGAHFHPSPAMGGFGLKHPPPMMLIKNTPVPGNITSF |
| | | | SDVPVSSFITQYSTGQVTVEMEWELKKENSKRWNPEIQYTNNYNDPQFVD |
| | | | FAPDSTGEYRTTRPIGTRYLTRPL* |
| 50 | 13 | VP1_nt | ATGTCTTTTGTTGATCACCCTCCAGATTGGTTGAATGAAGTTGGTGAAGG |
| | | | TCTACGCGAGTTTTTGGGCCTTGAAGCGGGCCCACCGAAACCAAAACCCA |
| | | | ATCAGCAGCATCAAGATCAAGCCCGTGGTCTTGTGCTGCCTGGTTATAAC |
| | | | TATCTCGGACCCGGAAACGGGCTCGATCGAGGAGAGCCTGTCAACAGGGC |
| | | | AGACGAGGTCGCGCGAGAGCACGACATCTCGTACAACGAGCAGCTTGAGG |
| | | | CGGGAGACAACCCCTACCTCAAGTACAACCACGCGGACGCCGAGTTTCAG |
| | | | GAGAAGCTCGCCGACGACACATCCTTCGGGGGAAACCTCGGAAAGGCAGT |
| | | | CTTTCAGGCCAAGAAAAGGGTTCTCGAACCTTTTGGCCTGGTTGAAGAGG |
| | | | GTGCTAAGACGGCCCCTACCGGAAAGCGGATAGACGACCACTTTCCAAAA |
| | | | AGAAAGAAGGCTCGGACCGAAGAGGACTCCAAGCCTTCCACCTCGTCAGA |
| | | | CGCCGAAGCTGGACCCAGCGGATCCCAGCAGCTGCAAATCCCAGCCCAAC |
| | | | CAGCCTCAAGTTTGGGAGCTGATACAATGTCTGCGGGAGGTGGCGGCCCA |
| | | | TTGGGCGACAATAACCAAGGTGCCGATGGAGTGGGCAATGCCTCGGGAGA |
| | | | TTGGCATTGCGATTCCACGTGGATGGGGGACAGAGTCGTCACCAAGTCCA |
| | | | CCCGAACCTGGGTGCTGCCCAGCTACAACAACCACCAGTACCGAGAGATC |
| | | | AAAAGCGGCTCCGTCGACGGAAGCAACGCCAACGCCTACTTTGGATACAG |
| | | | CACCCCCTGGGGGTACTTTGACTTTAACCGCTTCCACAGCCACTGGAGCC |
| | | | CCCGAGACTGGCAAAGACTCATCAACAACTACTGGGGCTTCAGACCCCGG |
| | | | TCCCTCAGAGTCAAAATCTTCAACATTCAAGTCAAAGAGGTCACGGTGCA |
| | | | GGACTCCACCACCACCATCGCCAACAACCTCACCTCCACCGTCCAAGTGT |
| | | | TTACGGACGACGACTACCAGCTGCCCTACGTCGTCGGCAACGGGACCGAG |
| | | | GGATGCCTGCCGGCCTTCCCTCCGCAGGTCTTTACGCTGCCGCAGTACGG |
| | | | TTACGCGACGCTGAACCGCGACAACACAGAAAATCCCACCGAGAGGAGCA |
| | | | GCTTCTTCTGCCTAGAGTACTTTCCCAGCAAGATGCTGAGAACGGGCAAC |
| | | | AACTTTGAGTTTACCTACAACTTTGAGGAGGTGCCCTTCCACTCCAGCTT |
| | | | CGCTCCCAGTCAGAACCTGTTCAAGCTGGCCAACCCGCTGGTGGACCAGT |
| | | | ACTTGTACCGCTTCGTGAGCACAAATAACACTGGCGGAGTCCAGTTCAAC |
| | | | AAGAACCTGGCCGGGAGATACGCCAACACCTACAAAAACTGGTTCCCGGG |
| | | | GCCCATGGGCCGAACCCAGGGCTGGAACCTGGGCTCCGGGGTCAACCGCG |
| | | | CCAGTGTCAGCGCCTTCGCCACGACCAATAGGATGGAGCTCGAGGGCGCG |
| | | | AGTTACCAGGTGCCCCCGCAGCCGAACGGCATGACCAACAACCTCCAGGG |
| | | | CAGCAACACCTATGCCCTGGAGAACACTATGATCTTCAACAGCCAGCCGG |
| | | | CGAACCCGGGCACCACCGCCACGTACCTCGAGGGCAACATGCTCATCACC |
| | | | AGCGAGAGCGAGACACAGCCGGTGAACCGCGTGGCGTACAACGTCGGCGG |
| | | | GCAGATGGCCACCAACAACCAGAGCTCCACCACTGCCCCCGCGACCGGCA |
| | | | CGTACAACCTCCAGGAAATCGTGCCCGGCAGCGTGTGGATGGAGAGGGAC |
| | | | GTGTACCTCCAAGGACCCATCTGGGCCAAGATCCCAGAGACAGGGGCGCA |
| | | | CTTTCACCCCTCTCCGGCCATGGGCGGATTCGGACTCAAACACCCACCGC |
| | | | CCATGATGCTCATCAAGAACACGCCTGTGCCCGGAAATATCACCAGCTTC |
| | | | TCGGACGTGCCCGTCAGCAGCTTCATCACCCAGTACAGCACCGGGCAGGT |
| | | | CACCGTGGAGATGGAGTGGGAGCTCAAGAAGGAAAACTCCAAGAGGTGGA |
| | | | ACCCAGAGATCCAGTACACAAACAACTACAACGACCCCCAGTTTGTGGAC |
| | | | TTTGCCCCGGACAGCACCGGGGAATACAGAACCACCAGACCTATCGGAAC |
| | | | CCGATACCTTACCCGACCCCTTTAA |
| 51 | 13 | MAAP_aa | MKLVKVYASFWALKRAHRNQNPISSIKIKPVVLCCLVITISDPETGSIEE |
| | | | SLSTGQTRSRESTTSRTTSSLRRETTPTSSTTTRIPSFRRSSPTTHPSGE |
| | | | TSERQSFRPRKGFSNLLAWLKRVLRRPLPESG* |
| 52 | 13 | MAAP_nt | ATGAAGTTGGTGAAGGTCTACGCGAGTTTTTGGGCCTTGAAGCGGGCCCA |
| | | | CCGAAACCAAAACCCAATCAGCAGCATCAAGATCAAGCCCGTGGTCTTGT |
| | | | GCTGCCTGGTTATAACTATCTCGGACCCGGAAACGGGCTCGATCGAGGAG |
| | | | AGCCTGTCAACAGGGCAGACGAGGTCGCGCGAGAGCACGACATCTCGTAC |
| | | | AACGAGCAGCTTGAGGCGGGAGACAACCCCTACCTCAAGTACAACCACGC |
| | | | GGACGCCGAGTTTCAGGAGAAGCTCGCCGACGACACATCCTTCGGGGGAA |
| | | | ACCTCGGAAAGGCAGTCTTTCAGGCCAAGAAAAGGGTTCTCGAACCTTTT |
| | | | GGCCTGGTTGAAGAGGGTGCTAAGACGGCCCCTACCGGAAAGCGGATAG |
| 53 | 14 | VP1_aa | MSFVDHPPDWLEEVGEGLREFLGLEAGPPKPKPNQQHQDHARGLVLPGYN |
| | | | YLGPGNGLDRGEPVNRADEVAREHDISYNEQLEAGDNPYLKYNHADAEFQ |
| | | | EKLADDTSFGGNLGKAVFQAKKRVLEPFGLVEEGAKTAPTGKRIDDHFPK |
| | | | RKKARTEEDSKPSTSSDAEAGPSGSQQLQIPAQPASSLGADTMSAGGGGP |
| | | | LGDNNQGADGVGNASGDWHCDSTWMGDRVVTKSTRTWVLPSYNNHQYREI |
| | | | KSGSVDGSNANAYFGYSTPWGYFDFNRFHSHWSPRDWQRLINNYWGFRPR |
| | | | SLRVKIFNIQVKEVTVQDSTTTIANNLTSTVQVFTDDDYQLPYVVGNGTE |
| | | | GCLPAFPPQVFTLPQYGYATLNRDNTENPTERSSFFCLEYFPSKMLRTGN |
| | | | NFEFTYNFEEVPFHSSFAPSQNLFKLANPLVDQYLYRFVSTNNTGGVQFN |
| | | | KNLAGRYANTYKNWFPGPMGRTQGWNLGSGVNRASVSAFATTNRMELEGA |
| | | | SYQVPPQPNGMTNNLQGSNTYALENTMIFNSQPANPGTTATYLEGNMLIT |
| | | | SESETQPVNRVAYNVGGQMATNNQSSTTAPATGTYNLQEIVPGSVWMERD |
| | | | VYLQGPIWAKIPETGAHFHPSPAMGGFGLKHPPPMMLIKNTPVPGNITSF |
| | | | SDVPVSSFITQYSTGQVTVEMEWELKKENSKRWNPEIQYTNNYNDPQFVD |
| | | | FAPDSTGEYRTTRPIGTRYLTRPL* |
| 54 | 14 | VP1_nt | ATGTCTTTTGTTGATCACCCTCCAGATTGGTTGGAAGAAGTTGGTGAAGG |
| | | | TCTTCGCGAGTTTTTGGGCCTTGAAGCGGGCCCACCGAAACCAAAACCCA |
| | | | ATCAGCAGCATCAAGATCATGCCCGTGGTCTTGTGCTGCCTGGTTATAAC |
| | | | TATCTCGGACCCGGAAACGGGCTCGATCGAGGAGAGCCTGTCAACAGGGC |
| | | | AGACGAGGTCGCGCGAGAGCACGACATCTCGTACAACGAGCAGCTTGAGG |
| | | | CGGGAGACAACCCCTACCTCAAGTACAACCACGCGGACGCCGAGTTTCAG |
| | | | GAGAAGCTCGCCGACGACACATCCTTCGGGGGAAACCTCGGAAAGGCAGT |
| | | | CTTTCAGGCCAAGAAAAGGGTTCTCGAACCTTTTGGCCTGGTTGAAGAGG |
| | | | GTGCTAAGACGGCCCCTACCGGAAAGCGGATAGACGACCACTTTCCAAAA |
| | | | AGAAAGAAGGCTCGGACCGAAGAGGACTCCAAGCCTTCCACCTCGTCAGA |
| | | | CGCCGAAGCTGGACCCAGCGGATCCCAGCAGCTGCAAATCCCAGCCCAAC |
| | | | CAGCCTCAAGTTTGGGAGCTGATACAATGTCTGCGGGAGGTGGCGGCCCA |
| | | | TTGGGCGACAATAACCAAGGTGCCGATGGAGTGGGCAATGCCTCGGGAGA |
| | | | TTGGCATTGCGATTCCACGTGGATGGGGGACAGAGTCGTCACCAAGTCCA |
| | | | CCCGAACCTGGGTGCTGCCCAGCTACAACAACCACCAGTACCGAGAGATC |
| | | | AAAAGCGGCTCCGTCGACGGAAGCAACGCCAACGCCTACTTTGGATACAG |
| | | | CACCCCCTGGGGGTACTTTGACTTTAACCGCTTCCACAGCCACTGGAGCC |
| | | | CCCGAGACTGGCAAAGACTCATCAACAACTACTGGGGCTTCAGACCCCGG |
| | | | TCCCTCAGAGTCAAAATCTTCAACATTCAAGTCAAAGAGGTCACGGTGCA |
| | | | GGACTCCACCACCACCATCGCCAACAACCTCACCTCCACCGTCCAAGTGT |
| | | | TTACGGACGACGACTACCAGCTGCCCTACGTCGTCGGCAACGGGACCGAG |
| | | | GGATGCCTGCCGGCCTTCCCTCCGCAGGTCTTTACGCTGCCGCAGTACGG |
| | | | TTACGCGACGCTGAACCGCGACAACACAGAAAATCCCACCGAGAGGAGCA |
| | | | GCTTCTTCTGCCTAGAGTACTTTCCCAGCAAGATGCTGAGAACGGGCAAC |
| | | | AACTTTGAGTTTACCTACAACTTTGAGGAGGTGCCCTTCCACTCCAGCTT |
| | | | CGCTCCCAGTCAGAACCTGTTCAAGCTGGCCAACCCGCTGGTGGACCAGT |
| | | | ACTTGTACCGCTTCGTGAGCACAAATAACACTGGCGGAGTCCAGTTCAAC |
| | | | AAGAACCTGGCCGGGAGATACGCCAACACCTACAAAAACTGGTTCCCGGG |
| | | | GCCCATGGGCCGAACCCAGGGCTGGAACCTGGGCTCCGGGGTCAACCGCG |
| | | | CCAGTGTCAGCGCCTTCGCCACGACCAATAGGATGGAGCTCGAGGGCGCG |
| | | | AGTTACCAGGTGCCCCCGCAGCCGAACGGCATGACCAACAACCTCCAGGG |
| | | | CAGCAACACCTATGCCCTGGAGAACACTATGATCTTCAACAGCCAGCCGG |
| | | | CGAACCCGGGCACCACCGCCACGTACCTCGAGGGCAACATGCTCATCACC |
| | | | AGCGAGAGCGAGACACAGCCGGTGAACCGCGTGGCGTACAACGTCGGCGG |
| | | | GCAGATGGCCACCAACAACCAGAGCTCCACCACTGCCCCCGCGACCGGCA |
| | | | CGTACAACCTCCAGGAAATCGTGCCCGGCAGCGTGTGGATGGAGAGGGAC |
| | | | GTGTACCTCCAAGGACCCATCTGGGCCAAGATCCCAGAGACAGGGGCGCA |
| | | | CTTTCACCCCTCTCCGGCCATGGGCGGATTCGGACTCAAACACCCACCGC |
| | | | CCATGATGCTCATCAAGAACACGCCTGTGCCCGGAAATATCACCAGCTTC |
| | | | TCGGACGTGCCCGTCAGCAGCTTCATCACCCAGTACAGCACCGGGCAGGT |
| | | | CACCGTGGAGATGGAGTGGGAGCTCAAGAAGGAAAACTCCAAGAGGTGGA |
| | | | ACCCAGAGATCCAGTACACAAACAACTACAACGACCCCCAGTTTGTGGAC |
| | | | TTTGCCCCGGACAGCACCGGGGAATACAGAACCACCAGACCTATCGGAAC |
| | | | CCGATACCTTACCCGACCCCTTTAA |
| 55 | 14 | MAAP_aa | MPVVLCCLVITISDPETGSIEESLSTGQTRSRESTTSRTTSSLRRETTPT |
| | | | SSTTTRTPSFRRSSPTTHPSGETSERQSFRPRKGFSNLLAWLKRVLRRPL |
| | | | PESG* |
| 56 | 14 | MAAP_nt | ATGCCCGTGGTCTTGTGCTGCCTGGTTATAACTATCTCGGACCCGGAAAC |
| | | | GGGCTCGATCGAGGAGAGCCTGTCAACAGGGCAGACGAGGTCGCGCGAGA |
| | | | GCACGACATCTCGTACAACGAGCAGCTTGAGGCGGGAGACAACCCCTACC |
| | | | TCAAGTACAACCACGCGGACGCCGAGTTTCAGGAGAAGCTCGCCGACGAC |
| | | | ACATCCTTCGGGGGAAACCTCGGAAAGGCAGTCTTTCAGGCCAAGAAAAG |
| | | | GGTTCTCGAACCTTTTGGCCTGGTTGAAGAGGGTGCTAAGACGGCCCCTA |
| | | | CCGGAAAGCGGATAG |
| 57 | 15 | VP1_aa | MSFVDHPPDWLEEVGEGLREFLGLEAGPPKPKPNQQHQDQARGLVLPGYA |
| | | | YLGPFNGLDRGEPVNRADEVAREHDISYNEQLEAGDNPYLKYNHADAEFQ |
| | | | EKLADDTSFGGNLGKAVFQAKKRVLEPFGLVEEGAKTAPTGKRIDDHFPK |
| | | | RKKARTEEDSKPSTSSDAEAGPSGSQQLQIPAQPASSLGADTMSAGGGGP |
| | | | LGDNNQGADGVGNASGDWHCDSTWMGDRVVTKSTRTWVLPSYNNHQYREI |
| | | | KSGSVDGSNANAYFGYSTPWGYFDFNRFHSHWSPRDWQRLINNYWGFRPR |
| | | | SLRVKIFNIQVKEVTVQDSTTTIANNLTSTVQVFTDDDYQLPYVVGNGTE |
| | | | GCLPAFPPQVFTLPQYGYATLNRDNTENPTERSSFFCLEYFPSKMLRTGN |
| | | | NFEFTYNFEEVPFHSSFAPSQNLFKLANPLVDQYLYRFVSTNNTGGVQFN |
| | | | KNLAGRYANTYKNWFPGPMGRTQGWNLGSGVNRASVSAFATTNRMELEGA |
| | | | SYQVPPQPNGMTNNLQGSNTYALENTMIFNSQPANPGTTATYLEGNMLIT |
| | | | SESETQPVNRVAYNVGGQMATNNQSSTTAPATGTYNLQEIVPGSVWMERD |
| | | | VYLQGPIWAKIPETGAHFHPSPAMGGFGLKHPPPMMLIKNTPVPGNITSF |
| | | | SDVPVSSFITQYSTGQVTVEMEWELKKENSKRWNPEIQYTNNYNDPQFVD |
| | | | FAPDSTGEYRTTRPIGTRYLTRPL* |
| 58 | 15 | VP1_nt | ATGTCTTTTGTTGATCACCCTCCAGATTGGTTGGAAGAAGTTGGTGAAGG |
| | | | TCTTCGCGAGTTTTTGGGCCTTGAAGCGGGCCCACCGAAACCAAAACCCA |
| | | | ATCAGCAGCATCAAGATCAAGCCCGTGGTCTTGTGCTGCCTGGTTATGCC |
| | | | TATCTCGGACCCTTCAACGGGCTCGATCGAGGAGAGCCTGTCAACAGGGC |
| | | | AGACGAGGTCGCGCGAGAGCACGACATCTCGTACAACGAGCAGCTTGAGG |
| | | | CGGGAGACAACCCCTACCTCAAGTACAACCACGCGGACGCCGAGTTTCAG |
| | | | GAGAAGCTCGCCGACGACACATCCTTCGGGGGAAACCTCGGAAAGGCAGT |
| | | | CTTTCAGGCCAAGAAAAGGGTTCTCGAACCTTTTGGCCTGGTTGAAGAGG |
| | | | GTGCTAAGACGGCCCCTACCGGAAAGCGGATAGACGACCACTTTCCAAAA |
| | | | AGAAAGAAGGCTCGGACCGAAGAGGACTCCAAGCCTTCCACCTCGTCAGA |
| | | | CGCCGAAGCTGGACCCAGCGGATCCCAGCAGCTGCAAATCCCAGCCCAAC |
| | | | CAGCCTCAAGTTTGGGAGCTGATACAATGTCTGCGGGAGGTGGCGGCCCA |
| | | | TTGGGCGACAATAACCAAGGTGCCGATGGAGTGGGCAATGCCTCGGGAGA |
| | | | TTGGCATTGCGATTCCACGTGGATGGGGGACAGAGTCGTCACCAAGTCCA |
| | | | CCCGAACCTGGGTGCTGCCCAGCTACAACAACCACCAGTACCGAGAGATC |
| | | | AAAAGCGGCTCCGTCGACGGAAGCAACGCCAACGCCTACTTTGGATACAG |
| | | | CACCCCCTGGGGGTACTTTGACTTTAACCGCTTCCACAGCCACTGGAGCC |
| | | | CCCGAGACTGGCAAAGACTCATCAACAACTACTGGGGCTTCAGACCCCGG |
| | | | TCCCTCAGAGTCAAAATCTTCAACATTCAAGTCAAAGAGGTCACGGTGCA |
| | | | GGACTCCACCACCACCATCGCCAACAACCTCACCTCCACCGTCCAAGTGT |
| | | | TTACGGACGACGACTACCAGCTGCCCTACGTCGTCGGCAACGGGACCGAG |
| | | | GGATGCCTGCCGGCCTTCCCTCCGCAGGTCTTTACGCTGCCGCAGTACGG |
| | | | TTACGCGACGCTGAACCGCGACAACACAGAAAATCCCACCGAGAGGAGCA |
| | | | GCTTCTTCTGCCTAGAGTACTTTCCCAGCAAGATGCTGAGAACGGGCAAC |
| | | | AACTTTGAGTTTACCTACAACTTTGAGGAGGTGCCCTTCCACTCCAGCTT |
| | | | CGCTCCCAGTCAGAACCTGTTCAAGCTGGCCAACCCGCTGGTGGACCAGT |
| | | | ACTTGTACCGCTTCGTGAGCACAAATAACACTGGCGGAGTCCAGTTCAAC |
| | | | AAGAACCTGGCCGGGAGATACGCCAACACCTACAAAAACTGGTTCCCGGG |
| | | | GCCCATGGGCCGAACCCAGGGCTGGAACCTGGGCTCCGGGGTCAACCGCG |
| | | | CCAGTGTCAGCGCCTTCGCCACGACCAATAGGATGGAGCTCGAGGGCGCG |
| | | | AGTTACCAGGTGCCCCCGCAGCCGAACGGCATGACCAACAACCTCCAGGG |
| | | | CAGCAACACCTATGCCCTGGAGAACACTATGATCTTCAACAGCCAGCCGG |
| | | | CGAACCCGGGCACCACCGCCACGTACCTCGAGGGCAACATGCTCATCACC |
| | | | AGCGAGAGCGAGACACAGCCGGTGAACCGCGTGGCGTACAACGTCGGCGG |
| | | | GCAGATGGCCACCAACAACCAGAGCTCCACCACTGCCCCCGCGACCGGCA |
| | | | CGTACAACCTCCAGGAAATCGTGCCCGGCAGCGTGTGGATGGAGAGGGAC |
| | | | GTGTACCTCCAAGGACCCATCTGGGCCAAGATCCCAGAGACAGGGGCGCA |
| | | | CTTTCACCCCTCTCCGGCCATGGGCGGATTCGGACTCAAACACCCACCGC |
| | | | CCATGATGCTCATCAAGAACACGCCTGTGCCCGGAAATATCACCAGCTTC |
| | | | TCGGACGTGCCCGTCAGCAGCTTCATCACCCAGTACAGCACCGGGCAGGT |
| | | | CACCGTGGAGATGGAGTGGGAGCTCAAGAAGGAAAACTCCAAGAGGTGGA |
| | | | ACCCAGAGATCCAGTACACAAACAACTACAACGACCCCCAGTTTGTGGAC |
| | | | TTTGCCCCGGACAGCACCGGGGAATACAGAACCACCAGACCTATCGGAAC |
| | | | CCGATACCTTACCCGACCCCTTTAA |
| 59 | 15 | MAAP_aa | MPISDPSTGSIEESLSTGQTRSRESTTSRTTSSLRRETTPTSSTTTRTPS |
| | | | FRRSSPTTHPSGETSERQSFRPRKGFSNLLAWLKRVLRRPLPESG* |
| 60 | 15 | MAAP_nt | ATGCCTATCTCGGACCCTTCAACGGGCTCGATCGAGGAGAGCCTGTCAAC |
| | | | AGGGCAGACGAGGTCGCGCGAGAGCACGACATCTCGTACAACGAGCAGCT |
| | | | TGAGGCGGGAGACAACCCCTACCTCAAGTACAACCACGCGGACGCCGAGT |
| | | | TTCAGGAGAAGCTCGCCGACGACACATCCTTCGGGGGAAACCTCGGAAAG |
| | | | GCAGTCTTTCAGGCCAAGAAAAGGGTTCTCGAACCTTTTGGCCTGGTTGA |
| | | | AGAGGGTGCTAAGACGGCCCCTACCGGAAAGCGGATAG |
| 61 | 16 | VP1_aa | MSFVDHPPDWLEEVGEGLREFLGLEAGPPKPKPNQQHQDQARGLVLPGYN |
| | | | YLGPGNGLDRGEPVNRADEVAREHDISYNEQLHAGDNPYLKYNHADAEFQ |
| | | | EKLADDTSFGGNLGKAVFQAKKRVLEPFGLVEEGAKTAPTGKRIDDHFPK |
| | | | RKKARTEEDSKPSTSSDAEAGPSGSQQLQIPAQPASSLGADTMSAGGGGP |
| | | | LGDNNQGADGVGNASGDWHCDSTWMGDRVVTKSTRTWVLPSYNNHQYREI |
| | | | KSGSVDGSNANAYFGYSTPWGYFDFNRFHSHWSPRDWQRLINNYWGFRPR |
| | | | SLRVKIFNIQVKEVTVQDSTTTIANNLTSTVQVFTDDDYQLPYVVGNGTE |
| | | | GCLPAFPPQVFTLPQYGYATLNRDNTENPTERSSFFCLEYFPSKMLRTGN |
| | | | NFEFTYNFEEVPFHSSFAPSQNLFKLANPLVDQYLYRFVSTNNTGGVQFN |
| | | | KNLAGRYANTYKNWFPGPMGRTQGWNLGSGVNRASVSAFATTNRMELEGA |
| | | | SYQVPPQPNGMTNNLQGSNTYALENTMIFNSQPANPGTTATYLEGNMLIT |
| | | | SESETQPVNRVAYNVGGQMATNNQSSTTAPATGTYNLQEIVPGSVWMERD |
| | | | VYLQGPIWAKIPETGAHFHPSPAMGGFGLKHPPPMMLIKNTPVPGNITSF |
| | | | SDVPVSSFITQYSTGQVTVEMEWELKKENSKRWNPEIQYTNNYNDPQFVD |
| | | | FAPDSTGEYRTTRPIGTRYLTRPL* |
| 62 | 16 | VP1_nt | ATGTCTTTTGTTGATCACCCTCCAGATTGGTTGGAAGAAGTTGGTGAAGG |
| | | | TCTTCGCGAGTTTTTGGGCCTTGAAGCGGGCCCACCGAAACCAAAACCCA |
| | | | ATCAGCAGCATCAAGATCAAGCCCGTGGTCTTGTGCTGCCTGGTTATAAC |
| | | | TATCTCGGACCCGGAAACGGGCTCGATCGAGGAGAGCCTGTCAACAGGGC |
| | | | AGACGAGGTCGCGCGAGAGCACGACATCTCGTACAACGAGCAGCTTCATG |
| | | | CGGGAGACAACCCCTACCTCAAGTACAACCACGCGGACGCCGAGTTTCAG |
| | | | GAGAAGCTCGCCGACGACACATCCTTCGGGGGAAACCTCGGAAAGGCAGT |
| | | | CTTTCAGGCCAAGAAAAGGGTTCTCGAACCTTTTGGCCTGGTTGAAGAGG |
| | | | GTGCTAAGACGGCCCCTACCGGAAAGCGGATAGACGACCACTTTCCAAAA |
| | | | AGAAAGAAGGCTCGGACCGAAGAGGACTCCAAGCCTTCCACCTCGTCAGA |
| | | | CGCCGAAGCTGGACCCAGCGGATCCCAGCAGCTGCAAATCCCAGCCCAAC |
| | | | CAGCCTCAAGTTTGGGAGCTGATACAATGTCTGCGGGAGGTGGCGGCCCA |
| | | | TTGGGCGACAATAACCAAGGTGCCGATGGAGTGGGCAATGCCTCGGGAGA |
| | | | TTGGCATTGCGATTCCACGTGGATGGGGGACAGAGTCGTCACCAAGTCCA |
| | | | CCCGAACCTGGGTGCTGCCCAGCTACAACAACCACCAGTACCGAGAGATC |
| | | | AAAAGCGGCTCCGTCGACGGAAGCAACGCCAACGCCTACTTTGGATACAG |
| | | | CACCCCCTGGGGGTACTTTGACTTTAACCGCTTCCACAGCCACTGGAGCC |
| | | | CCCGAGACTGGCAAAGACTCATCAACAACTACTGGGGCTTCAGACCCCGG |
| | | | TCCCTCAGAGTCAAAATCTTCAACATTCAAGTCAAAGAGGTCACGGTGCA |
| | | | GGACTCCACCACCACCATCGCCAACAACCTCACCTCCACCGTCCAAGTGT |
| | | | TTACGGACGACGACTACCAGCTGCCCTACGTCGTCGGCAACGGGACCGAG |
| | | | GGATGCCTGCCGGCCTTCCCTCCGCAGGTCTTTACGCTGCCGCAGTACGG |
| | | | TTACGCGACGCTGAACCGCGACAACACAGAAAATCCCACCGAGAGGAGCA |
| | | | GCTTCTTCTGCCTAGAGTACTTTCCCAGCAAGATGCTGAGAACGGGCAAC |
| | | | AACTTTGAGTTTACCTACAACTTTGAGGAGGTGCCCTTCCACTCCAGCTT |
| | | | CGCTCCCAGTCAGAACCTGTTCAAGCTGGCCAACCCGCTGGTGGACCAGT |
| | | | ACTTGTACCGCTTCGTGAGCACAAATAACACTGGCGGAGTCCAGTTCAAC |
| | | | AAGAACCTGGCCGGGAGATACGCCAACACCTACAAAAACTGGTTCCCGGG |
| | | | GCCCATGGGCCGAACCCAGGGCTGGAACCTGGGCTCCGGGGTCAACCGCG |
| | | | CCAGTGTCAGCGCCTTCGCCACGACCAATAGGATGGAGCTCGAGGGCGCG |
| | | | AGTTACCAGGTGCCCCCGCAGCCGAACGGCATGACCAACAACCTCCAGGG |
| | | | CAGCAACACCTATGCCCTGGAGAACACTATGATCTTCAACAGCCAGCCGG |
| | | | CGAACCCGGGCACCACCGCCACGTACCTCGAGGGCAACATGCTCATCACC |
| | | | AGCGAGAGCGAGACACAGCCGGTGAACCGCGTGGCGTACAACGTCGGCGG |
| | | | GCAGATGGCCACCAACAACCAGAGCTCCACCACTGCCCCCGCGACCGGCA |
| | | | CGTACAACCTCCAGGAAATCGTGCCCGGCAGCGTGTGGATGGAGAGGGAC |
| | | | GTGTACCTCCAAGGACCCATCTGGGCCAAGATCCCAGAGACAGGGGCGCA |
| | | | CTTTCACCCCTCTCCGGCCATGGGCGGATTCGGACTCAAACACCCACCGC |
| | | | CCATGATGCTCATCAAGAACACGCCTGTGCCCGGAAATATCACCAGCTTC |
| | | | TCGGACGTGCCCGTCAGCAGCTTCATCACCCAGTACAGCACCGGGCAGGT |
| | | | CACCGTGGAGATGGAGTGGGAGCTCAAGAAGGAAAACTCCAAGAGGTGGA |
| | | | ACCCAGAGATCCAGTACACAAACAACTACAACGACCCCCAGTTTGTGGAC |
| | | | TTTGCCCCGGACAGCACCGGGGAATACAGAACCACCAGACCTATCGGAAC |
| | | | CCGATACCTTACCCGACCCCTTTAA |
| 63 | 16 | MAAP_aa | MRETTPTSSTTTRTPSFRRSSPTTHPSGETSERQSFRPRKGFSNLLAWLK |
| | | | RVLRRPLPESG* |
| 64 | 16 | MAAP_nt | ATGCGGGAGACAACCCCTACCTCAAGTACAACCACGCGGACGCCGAGTTT |
| | | | CAGGAGAAGCTCGCCGACGACACATCCTTCGGGGGAAACCTCGGAAAGGC |
| | | | AGTCTTTCAGGCCAAGAAAAGGGTTCTCGAACCTTTTGGCCTGGTTGAAG |
| | | | AGGGTGCTAAGACGGCCCCTACCGGAAAGCGGATAG |
| 65 | 17 | VP1_aa | MSFVDHPPDWLEEVGEGLREFLGLEAGPPKPKPNQQHQDQARGLVLPGYA |
| | | | YLGPGNGLDRGEPVNRADEVAREHDISYNEQLEAGDNPYLKYNHADAEFQ |
| | | | EKLADDTSFGGNLGKAVFQAKKRVLEPFGLVEEGAKTAPTGKRIDDHFPK |
| | | | RKKARTEEDSKPSTSSDAEAGPSGSQQLQIPAQPASSLGADTMSAGGGGP |
| | | | LGDNNQGADGVGNASGDWHCDSTWMGDRVVTKSTRTWVLPSYNNHQYREI |
| | | | KSGSVDGSNANAYFGYSTPWGYFDFNRFHSHWSPRDWQRLINNYWGFRPR |
| | | | SLRVKIFNIQVKEVTVQDSTTTIANNLTSTVQVFTDDDYQLPYVVGNGTE |
| | | | GCLPAFPPQVFTLPQYGYATLNRDNTENPTERSSFFCLEYFPSKMLRTGN |
| | | | NFEFTYNFEEVPFHSSFAPSQNLFKLANPLVDQYLYRFVSTNNTGGVQFN |
| | | | KNLAGRYANTYKNWFPGPMGRTQGWNLGSGVNRASVSAFATTNRMELEGA |
| | | | SYQVPPQPNGMTNNLQGSNTYALENTMIFNSQPANPGTTATYLEGNMLIT |
| | | | SESETQPVNRVAYNVGGQMATNNQSSTTAPATGTYNLQEIVPGSVWMERD |
| | | | VYLQGPIWAKIPETGAHFHPSPAMGGFGLKHPPPMMLIKNTPVPGNITSF |
| | | | SDVPVSSFITQYSTGQVTVEMEWELKKENSKRWNPEIQYTNNYNDPQFVD |
| | | | FAPDSTGEYRTTRPIGTRYLTRPL* |
| 66 | 17 | VP1_nt | ATGTCTTTTGTTGATCACCCTCCAGATTGGTTGGAAGAAGTTGGTGAAGG |
| | | | TCTTCGCGAGTTTTTGGGCCTTGAAGCGGGCCCACCGAAACCAAAACCCA |
| | | | ATCAGCAGCATCAAGATCAAGCCCGTGGTCTTGTGCTGCCTGGTTATGCT |
| | | | TATCTCGGACCCGGAAACGGGCTCGATCGAGGAGAGCCTGTCAACAGGGC |
| | | | AGACGAGGTCGCGCGAGAGCACGACATCTCGTACAACGAGCAGCTTGAGG |
| | | | CGGGAGACAACCCCTACCTCAAGTACAACCACGCGGACGCCGAGTTTCAG |
| | | | GAGAAGCTCGCCGACGACACATCCTTCGGGGGAAACCTCGGAAAGGCAGT |
| | | | CTTTCAGGCCAAGAAAAGGGTTCTCGAACCTTTTGGCCTGGTTGAAGAGG |
| | | | GTGCTAAGACGGCCCCTACCGGAAAGCGGATAGACGACCACTTTCCAAAA |
| | | | AGAAAGAAGGCTCGGACCGAAGAGGACTCCAAGCCTTCCACCTCGTCAGA |
| | | | CGCCGAAGCTGGACCCAGCGGATCCCAGCAGCTGCAAATCCCAGCCCAAC |
| | | | CAGCCTCAAGTTTGGGAGCTGATACAATGTCTGCGGGAGGTGGCGGCCCA |
| | | | TTGGGCGACAATAACCAAGGTGCCGATGGAGTGGGCAATGCCTCGGGAGA |
| | | | TTGGCATTGCGATTCCACGTGGATGGGGGACAGAGTCGTCACCAAGTCCA |
| | | | CCCGAACCTGGGTGCTGCCCAGCTACAACAACCACCAGTACCGAGAGATC |
| | | | AAAAGCGGCTCCGTCGACGGAAGCAACGCCAACGCCTACTTTGGATACAG |
| | | | CACCCCCTGGGGGTACTTTGACTTTAACCGCTTCCACAGCCACTGGAGCC |
| | | | CCCGAGACTGGCAAAGACTCATCAACAACTACTGGGGCTTCAGACCCCGG |
| | | | TCCCTCAGAGTCAAAATCTTCAACATTCAAGTCAAAGAGGTCACGGTGCA |
| | | | GGACTCCACCACCACCATCGCCAACAACCTCACCTCCACCGTCCAAGTGT |
| | | | TTACGGACGACGACTACCAGCTGCCCTACGTCGTCGGCAACGGGACCGAG |
| | | | GGATGCCTGCCGGCCTTCCCTCCGCAGGTCTTTACGCTGCCGCAGTACGG |
| | | | TTACGCGACGCTGAACCGCGACAACACAGAAAATCCCACCGAGAGGAGCA |
| | | | GCTTCTTCTGCCTAGAGTACTTTCCCAGCAAGATGCTGAGAACGGGCAAC |
| | | | AACTTTGAGTTTACCTACAACTTTGAGGAGGTGCCCTTCCACTCCAGCTT |
| | | | CGCTCCCAGTCAGAACCTGTTCAAGCTGGCCAACCCGCTGGTGGACCAGT |
| | | | ACTTGTACCGCTTCGTGAGCACAAATAACACTGGCGGAGTCCAGTTCAAC |
| | | | AAGAACCTGGCCGGGAGATACGCCAACACCTACAAAAACTGGTTCCCGGG |
| | | | GCCCATGGGCCGAACCCAGGGCTGGAACCTGGGCTCCGGGGTCAACCGCG |
| | | | CCAGTGTCAGCGCCTTCGCCACGACCAATAGGATGGAGCTCGAGGGCGCG |
| | | | AGTTACCAGGTGCCCCCGCAGCCGAACGGCATGACCAACAACCTCCAGGG |
| | | | CAGCAACACCTATGCCCTGGAGAACACTATGATCTTCAACAGCCAGCCGG |
| | | | CGAACCCGGGCACCACCGCCACGTACCTCGAGGGCAACATGCTCATCACC |
| | | | AGCGAGAGCGAGACACAGCCGGTGAACCGCGTGGCGTACAACGTCGGCGG |
| | | | GCAGATGGCCACCAACAACCAGAGCTCCACCACTGCCCCCGCGACCGGCA |
| | | | CGTACAACCTCCAGGAAATCGTGCCCGGCAGCGTGTGGATGGAGAGGGAC |
| | | | GTGTACCTCCAAGGACCCATCTGGGCCAAGATCCCAGAGACAGGGGCGCA |
| | | | CTTTCACCCCTCTCCGGCCATGGGCGGATTCGGACTCAAACACCCACCGC |
| | | | CCATGATGCTCATCAAGAACACGCCTGTGCCCGGAAATATCACCAGCTTC |
| | | | TCGGACGTGCCCGTCAGCAGCTTCATCACCCAGTACAGCACCGGGCAGGT |
| | | | CACCGTGGAGATGGAGTGGGAGCTCAAGAAGGAAAACTCCAAGAGGTGGA |
| | | | ACCCAGAGATCCAGTACACAAACAACTACAACGACCCCCAGTTTGTGGAC |
| | | | TTTGCCCCGGACAGCACCGGGGAATACAGAACCACCAGACCTATCGGAAC |
| | | | CCGATACCTTACCCGACCCCTTTAA |
| 67 | 17 | MAAP_aa | MLISDPETGSIEESLSTGQTRSRESTTSRTTSSLRRETTPTSSTTTRTPS |
| | | | FRRSSPTTHPSGETSERQSFRPRKGFSNLLAWLKRVLRRPLPESG* |
| 68 | 17 | MAAP_nt | ATGCTTATCTCGGACCCGGAAACGGGCTCGATCGAGGAGAGCCTGTCAAC |
| | | | AGGGCAGACGAGGTCGCGCGAGAGCACGACATCTCGTACAACGAGCAGCT |
| | | | TGAGGCGGGAGACAACCCCTACCTCAAGTACAACCACGCGGACGCCGAGT |
| | | | TTCAGGAGAAGCTCGCCGACGACACATCCTTCGGGGGAAACCTCGGAAAG |
| | | | GCAGTCTTTCAGGCCAAGAAAAGGGTTCTCGAACCTTTTGGCCTGGTTGA |
| | | | AGAGGGTGCTAAGACGGCCCCTACCGGAAAGCGGATAG |
| 69 | 18 | VP1_aa | MSFVDHPPDWLEEVGEGLREFLGLEAGPPKPKPNQQHQDHARGLVLPGYN |
| | | | YLGPGNGLERGEPVNRADEVAREHDISYNEQLEAGDNPYLKYNHADAEFQ |
| | | | EKLADDTSFGGNLGKAVFQAKKRVLEPFGLVEEGAKTAPTGKRIDDHFPK |
| | | | RKKARTEEDSKPSTSSDAEAGPSGSQQLQIPAQPASSLGADTMSAGGGGP |
| | | | LGDNNQGADGVGNASGDWHCDSTWMGDRVVTKSTRTWVLPSYNNHQYREI |
| | | | KSGSVDGSNANAYFGYSTPWGYFDFNRFHSHWSPRDWQRLINNYWGFRPR |
| | | | SLRVKIFNIQVKEVTVQDSTTTIANNLTSTVQVFTDDDYQLPYVVGNGTE |
| | | | GCLPAFPPQVFTLPQYGYATLNRDNTENPTERSSFFCLEYFPSKMLRTGN |
| | | | NFEFTYNFEEVPFHSSFAPSQNLFKLANPLVDQYLYRFVSTNNTGGVQFN |
| | | | KNLAGRYANTYKNWFPGPMGRTQGWNLGSGVNRASVSAFATTNRMELEGA |
| | | | SYQVPPQPNGMTNNLQGSNTYALENTMIFNSQPANPGTTATYLEGNMLIT |
| | | | SESETQPVNRVAYNVGGQMATNNQSSTTAPATGTYNLQEIVPGSVWMERD |
| | | | VYLQGPIWAKIPETGAHFHPSPAMGGFGLKHPPPMMLIKNTPVPGNITSF |
| | | | SDVPVSSFITQYSTGQVTVEMEWELKKENSKRWNPEIQYTNNYNDPQFVD |
| | | | FAPDSTGEYRTTRPIGTRYLTRPL* |
| 70 | 18 | VP1_nt | ATGTCTTTTGTTGATCACCCTCCAGATTGGTTGGAAGAAGTTGGTGAAGG |
| | | | TCTTCGCGAGTTTTTGGGCCTTGAAGCGGGCCCACCGAAACCAAAACCCA |
| | | | ATCAGCAGCATCAAGATCATGCCCGTGGTCTTGTGCTGCCTGGTTATAAC |
| | | | TATCTCGGACCCGGAAACGGGCTCGAGCGAGGAGAGCCTGTCAACAGGGC |
| | | | AGACGAGGTCGCGCGAGAGCACGACATCTCGTACAACGAGCAGCTTGAGG |
| | | | CGGGAGACAACCCCTACCTCAAGTACAACCACGCGGACGCCGAGTTTCAG |
| | | | GAGAAGCTCGCCGACGACACATCCTTCGGGGGAAACCTCGGAAAGGCAGT |
| | | | CTTTCAGGCCAAGAAAAGGGTTCTCGAACCTTTTGGCCTGGTTGAAGAGG |
| | | | GTGCTAAGACGGCCCCTACCGGAAAGCGGATAGACGACCACTTTCCAAAA |
| | | | AGAAAGAAGGCTCGGACCGAAGAGGACTCCAAGCCTTCCACCTCGTCAGA |
| | | | CGCCGAAGCTGGACCCAGCGGATCCCAGCAGCTGCAAATCCCAGCCCAAC |
| | | | CAGCCTCAAGTTTGGGAGCTGATACAATGTCTGCGGGAGGTGGCGGCCCA |
| | | | TTGGGCGACAATAACCAAGGTGCCGATGGAGTGGGCAATGCCTCGGGAGA |
| | | | TTGGCATTGCGATTCCACGTGGATGGGGGACAGAGTCGTCACCAAGTCCA |
| | | | CCCGAACCTGGGTGCTGCCCAGCTACAACAACCACCAGTACCGAGAGATC |
| | | | AAAAGCGGCTCCGTCGACGGAAGCAACGCCAACGCCTACTTTGGATACAG |
| | | | CACCCCCTGGGGGTACTTTGACTTTAACCGCTTCCACAGCCACTGGAGCC |
| | | | CCCGAGACTGGCAAAGACTCATCAACAACTACTGGGGCTTCAGACCCCGG |
| | | | TCCCTCAGAGTCAAAATCTTCAACATTCAAGTCAAAGAGGTCACGGTGCA |
| | | | GGACTCCACCACCACCATCGCCAACAACCTCACCTCCACCGTCCAAGTGT |
| | | | TTACGGACGACGACTACCAGCTGCCCTACGTCGTCGGCAACGGGACCGAG |
| | | | GGATGCCTGCCGGCCTTCCCTCCGCAGGTCTTTACGCTGCCGCAGTACGG |
| | | | TTACGCGACGCTGAACCGCGACAACACAGAAAATCCCACCGAGAGGAGCA |
| | | | GCTTCTTCTGCCTAGAGTACTTTCCCAGCAAGATGCTGAGAACGGGCAAC |
| | | | AACTTTGAGTTTACCTACAACTTTGAGGAGGTGCCCTTCCACTCCAGCTT |
| | | | CGCTCCCAGTCAGAACCTGTTCAAGCTGGCCAACCCGCTGGTGGACCAGT |
| | | | ACTTGTACCGCTTCGTGAGCACAAATAACACTGGCGGAGTCCAGTTCAAC |
| | | | AAGAACCTGGCCGGGAGATACGCCAACACCTACAAAAACTGGTTCCCGGG |
| | | | GCCCATGGGCCGAACCCAGGGCTGGAACCTGGGCTCCGGGGTCAACCGCG |
| | | | CCAGTGTCAGCGCCTTCGCCACGACCAATAGGATGGAGCTCGAGGGCGCG |
| | | | AGTTACCAGGTGCCCCCGCAGCCGAACGGCATGACCAACAACCTCCAGGG |
| | | | CAGCAACACCTATGCCCTGGAGAACACTATGATCTTCAACAGCCAGCCGG |
| | | | CGAACCCGGGCACCACCGCCACGTACCTCGAGGGCAACATGCTCATCACC |
| | | | AGCGAGAGCGAGACACAGCCGGTGAACCGCGTGGCGTACAACGTCGGCGG |
| | | | GCAGATGGCCACCAACAACCAGAGCTCCACCACTGCCCCCGCGACCGGCA |
| | | | CGTACAACCTCCAGGAAATCGTGCCCGGCAGCGTGTGGATGGAGAGGGAC |
| | | | GTGTACCTCCAAGGACCCATCTGGGCCAAGATCCCAGAGACAGGGGCGCA |
| | | | CTTTCACCCCTCTCCGGCCATGGGCGGATTCGGACTCAAACACCCACCGC |
| | | | CCATGATGCTCATCAAGAACACGCCTGTGCCCGGAAATATCACCAGCTTC |
| | | | TCGGACGTGCCCGTCAGCAGCTTCATCACCCAGTACAGCACCGGGCAGGT |
| | | | CACCGTGGAGATGGAGTGGGAGCTCAAGAAGGAAAACTCCAAGAGGTGGA |
| | | | ACCCAGAGATCCAGTACACAAACAACTACAACGACCCCCAGTTTGTGGAC |
| | | | TTTGCCCCGGACAGCACCGGGGAATACAGAACCACCAGACCTATCGGAAC |
| | | | CCGATACCTTACCCGACCCCTTTAA |
| 71 | 18 | MAAP_aa | MPVVLCCLVITISDPETGSSEESLSTGQTRSRESTTSRTTSSLRRETTPT |
| | | | SSTTTRTPSFRRSSPTTHPSGETSERQSFRPRKGFSNLLAWLKRVLRRPL |
| | | | PESG* |
| 72 | 18 | MAAP_nt | ATGCCCGTGGTCTTGTGCTGCCTGGTTATAACTATCTCGGACCCGGAAAC |
| | | | GGGCTCGAGCGAGGAGAGCCTGTCAACAGGGCAGACGAGGTCGCGCGAGA |
| | | | GCACGACATCTCGTACAACGAGCAGCTTGAGGCGGGAGACAACCCCTACC |
| | | | TCAAGTACAACCACGCGGACGCCGAGTTTCAGGAGAAGCTCGCCGACGAC |
| | | | ACATCCTTCGGGGGAAACCTCGGAAAGGCAGTCTTTCAGGCCAAGAAAAG |
| | | | GGTTCTCGAACCTTTTGGCCTGGTTGAAGAGGGTGCTAAGACGGCCCCTA |
| | | | CCGGAAAGCGGATAG |
| 73 | 19 | VP1_aa | MAFVDHPPDWLEEVGEGLREFWDLKPGAPKPKPNQQHQDQARGLVLPGYN |
| | | | YLGPGNGLDRGEPVNRADEVAREHDISYNEQLEAGDNPYLKYNHADAEFQ |
| | | | EKLADDTSFGGNLGKAVFQAKKRVLEPFGLVEEGAKTAPTGKRIDDHFPK |
| | | | RKKARTEEDSKPSTSSDAEAGPSGSQQLQIPAQPASSLGADTMSAGGGGP |
| | | | LGDNNQGADGVGNASGDWHCDSTWMGDRVVTKSTRTWVLPSYNNHQYREI |
| | | | KSGSVDGSNANAYFGYSTPWGYFDFNRFHSHWSPRDWQRLINNYWGFRPR |
| | | | SLRVKIFNIQVKEVTVQDSTTTIANNLTSTVQVFTDDDYQLPYVVGNGTE |
| | | | GCLPAFPPQVFTLPQYGYATLNRDNTENPTERSSFFCLEYFPSKMLRTGN |
| | | | NFEFTYNFEEVPFHSSFAPSQNLFKLANPLVDQYLYRFVSTNNTGGVQFN |
| | | | KNLAGRYANTYKNWFPGPMGRTQGWNLGSGVNRASVSAFATTNRMELEGA |
| | | | SYQVPPQPNGMTNNLQGSNTYALENTMIFNSQPANPGTTATYLEGNMLIT |
| | | | SESETQPVNRVAYNVGGQMATNNQSSTTAPATGTYNLQEIVPGSVWMERD |
| | | | VYLQGPIWAKIPETGAHFHPSPAMGGFGLKHPPPMMLIKNTPVPGNITSF |
| | | | SDVPVSSFITQYSTGQVTVEMEWELKKENSKRWNPEIQYTNNYNDPQFVD |
| | | | FAPDSTGEYRTTRPIGTRYLTRPL* |
| 74 | 19 | VP1_nt | ATGGCGTTTGTTGATCACCCTCCAGATTGGTTGGAAGAAGTTGGTGAAGG |
| | | | TCTACGCGAGTTTTGGGACCTTAAACCTGGCGCTCCGAAACCAAAACCCA |
| | | | ATCAGCAGCATCAAGATCAAGCCCGTGGTCTTGTGCTGCCTGGTTATAAC |
| | | | TATCTCGGACCCGGAAACGGGCTCGATCGAGGAGAGCCTGTCAACAGGGC |
| | | | AGACGAGGTCGCGCGAGAGCACGACATCTCGTACAACGAGCAGCTTGAGG |
| | | | CGGGAGACAACCCCTACCTCAAGTACAACCACGCGGACGCCGAGTTTCAG |
| | | | GAGAAGCTCGCCGACGACACATCCTTCGGGGGAAACCTCGGAAAGGCAGT |
| | | | CTTTCAGGCCAAGAAAAGGGTTCTCGAACCTTTTGGCCTGGTTGAAGAGG |
| | | | GTGCTAAGACGGCCCCTACCGGAAAGCGGATAGACGACCACTTTCCAAAA |
| | | | AGAAAGAAGGCTCGGACCGAAGAGGACTCCAAGCCTTCCACCTCGTCAGA |
| | | | CGCCGAAGCTGGACCCAGCGGATCCCAGCAGCTGCAAATCCCAGCCCAAC |
| | | | CAGCCTCAAGTTTGGGAGCTGATACAATGTCTGCGGGAGGTGGCGGCCCA |
| | | | TTGGGCGACAATAACCAAGGTGCCGATGGAGTGGGCAATGCCTCGGGAGA |
| | | | TTGGCATTGCGATTCCACGTGGATGGGGGACAGAGTCGTCACCAAGTCCA |
| | | | CCCGAACCTGGGTGCTGCCCAGCTACAACAACCACCAGTACCGAGAGATC |
| | | | AAAAGCGGCTCCGTCGACGGAAGCAACGCCAACGCCTACTTTGGATACAG |
| | | | CACCCCCTGGGGGTACTTTGACTTTAACCGCTTCCACAGCCACTGGAGCC |
| | | | CCCGAGACTGGCAAAGACTCATCAACAACTACTGGGGCTTCAGACCCCGG |
| | | | TCCCTCAGAGTCAAAATCTTCAACATTCAAGTCAAAGAGGTCACGGTGCA |
| | | | GGACTCCACCACCACCATCGCCAACAACCTCACCTCCACCGTCCAAGTGT |
| | | | TTACGGACGACGACTACCAGCTGCCCTACGTCGTCGGCAACGGGACCGAG |
| | | | GGATGCCTGCCGGCCTTCCCTCCGCAGGTCTTTACGCTGCCGCAGTACGG |
| | | | TTACGCGACGCTGAACCGCGACAACACAGAAAATCCCACCGAGAGGAGCA |
| | | | GCTTCTTCTGCCTAGAGTACTTTCCCAGCAAGATGCTGAGAACGGGCAAC |
| | | | AACTTTGAGTTTACCTACAACTTTGAGGAGGTGCCCTTCCACTCCAGCTT |
| | | | CGCTCCCAGTCAGAACCTGTTCAAGCTGGCCAACCCGCTGGTGGACCAGT |
| | | | ACTTGTACCGCTTCGTGAGCACAAATAACACTGGCGGAGTCCAGTTCAAC |
| | | | AAGAACCTGGCCGGGAGATACGCCAACACCTACAAAAACTGGTTCCCGGG |
| | | | GCCCATGGGCCGAACCCAGGGCTGGAACCTGGGCTCCGGGGTCAACCGCG |
| | | | CCAGTGTCAGCGCCTTCGCCACGACCAATAGGATGGAGCTCGAGGGCGCG |
| | | | AGTTACCAGGTGCCCCCGCAGCCGAACGGCATGACCAACAACCTCCAGGG |
| | | | CAGCAACACCTATGCCCTGGAGAACACTATGATCTTCAACAGCCAGCCGG |
| | | | CGAACCCGGGCACCACCGCCACGTACCTCGAGGGCAACATGCTCATCACC |
| | | | AGCGAGAGCGAGACACAGCCGGTGAACCGCGTGGCGTACAACGTCGGCGG |
| | | | GCAGATGGCCACCAACAACCAGAGCTCCACCACTGCCCCCGCGACCGGCA |
| | | | CGTACAACCTCCAGGAAATCGTGCCCGGCAGCGTGTGGATGGAGAGGGAC |
| | | | GTGTACCTCCAAGGACCCATCTGGGCCAAGATCCCAGAGACAGGGGCGCA |
| | | | CTTTCACCCCTCTCCGGCCATGGGCGGATTCGGACTCAAACACCCACCGC |
| | | | CCATGATGCTCATCAAGAACACGCCTGTGCCCGGAAATATCACCAGCTTC |
| | | | TCGGACGTGCCCGTCAGCAGCTTCATCACCCAGTACAGCACCGGGCAGGT |
| | | | CACCGTGGAGATGGAGTGGGAGCTCAAGAAGGAAAACTCCAAGAGGTGGA |
| | | | ACCCAGAGATCCAGTACACAAACAACTACAACGACCCCCAGTTTGTGGAC |
| | | | TTTGCCCCGGACAGCACCGGGGAATACAGAACCACCAGACCTATCGGAAC |
| | | | CCGATACCTTACCCGACCCCTTTAA |
| 75 | 19 | MAAP_aa | LALRNQNPISSIKIKPVVLCCLVITISDPETGSIEESLSTGQTRSRESTT |
| | | | SRTTSSLRRETTPTSSTTTRTPSFRRSSPTTHPSGETSERQSFRPRKGFS |
| | | | NLLAWLKRVLRRPLPESG* |
| 76 | 19 | MAAP_nt | CTGGCGCTCCGAAACCAAAACCCAATCAGCAGCATCAAGATCAAGCCCGT |
| | | | GGTCTTGTGCTGCCTGGTTATAACTATCTCGGACCCGGAAACGGGCTCGA |
| | | | TCGAGGAGAGCCTGTCAACAGGGCAGACGAGGTCGCGCGAGAGCACGACA |
| | | | TCTCGTACAACGAGCAGCTTGAGGCGGGAGACAACCCCTACCTCAAGTAC |
| | | | AACCACGCGGACGCCGAGTTTCAGGAGAAGCTCGCCGACGACACATCCTT |
| | | | CGGGGGAAACCTCGGAAAGGCAGTCTTTCAGGCCAAGAAAAGGGTTCTCG |
| | | | AACCTTTTGGCCTGGTTGAAGAGGGTGCTAAGACGGCCCCTACCGGAAAG |
| | | | CGGATAG |
| 77 | 20 | VP1_aa | MSFVDHPPDWLEEVGEGLREFLGLEAGPPKPKPNQQHQDQARGLVLPGYN |
| | | | YLGPGNGLDRGEPVNRADEVAREHDISYNEQLNAGDNPYLKYNHADAEFQ |
| | | | EKLADDTSFGGNLGKAVFQAKKRVLEPFGLVEEGAKTAPTGKRIDDHFPK |
| | | | RKKARTEEDSKPSTSSDAEAGPSGSQQLQIPAQPASSLGADTMSAGGGGP |
| | | | LGDNNQGADGVGNASGDWHCDSTWMGDRVVTKSTRTWVLPSYNNHQYREI |
| | | | KSGSVDGSNANAYFGYSTPWGYFDFNRFHSHWSPRDWQRLINNYWGFRPR |
| | | | SLRVKIFNIQVKEVTVQDSTTTIANNLTSTVQVFTDDDYQLPYVVGNGTE |
| | | | GCLPAFPPQVFTLPQYGYATLNRDNTENPTERSSFFCLEYFPSKMLRTGN |
| | | | NFEFTYNFEEVPFHSSFAPSQNLFKLANPLVDQYLYRFVSTNNTGGVQFN |
| | | | KNLAGRYANTYKNWFPGPMGRTQGWNLGSGVNRASVSAFATTNRMELEGA |
| | | | SYQVPPQPNGMTNNLQGSNTYALENTMIFNSQPANPGTTATYLEGNMLIT |
| | | | SESETQPVNRVAYNVGGQMATNNQSSTTAPATGTYNLQEIVPGSVWMERD |
| | | | VYLQGPIWAKIPETGAHFHPSPAMGGFGLKHPPPMMLIKNTPVPGNITSF |
| | | | SDVPVSSFITQYSTGQVTVEMEWELKKENSKRWNPEIQYTNNYNDPQFVD |
| | | | FAPDSTGEYRTTRPIGTRYLTRPL* |
| 78 | 20 | VP1_nt | ATGTCTTTTGTTGATCACCCTCCAGATTGGTTGGAAGAAGTTGGTGAAGG |
| | | | TCTTCGCGAGTTTTTGGGCCTTGAAGCGGGCCCACCGAAACCAAAACCCA |
| | | | ATCAGCAGCATCAAGATCAAGCCCGTGGTCTTGTGCTGCCTGGTTATAAC |
| | | | TATCTCGGACCCGGAAACGGGCTCGATCGAGGAGAGCCTGTCAACAGGGC |
| | | | AGACGAGGTCGCGCGAGAGCACGACATCTCGTACAACGAGCAGCTTAATG |
| | | | CGGGAGACAACCCCTACCTCAAGTACAACCACGCGGACGCCGAGTTTCAG |
| | | | GAGAAGCTCGCCGACGACACATCCTTCGGGGGAAACCTCGGAAAGGCAGT |
| | | | CTTTCAGGCCAAGAAAAGGGTTCTCGAACCTTTTGGCCTGGTTGAAGAGG |
| | | | GTGCTAAGACGGCCCCTACCGGAAAGCGGATAGACGACCACTTTCCAAAA |
| | | | AGAAAGAAGGCTCGGACCGAAGAGGACTCCAAGCCTTCCACCTCGTCAGA |
| | | | CGCCGAAGCTGGACCCAGCGGATCCCAGCAGCTGCAAATCCCAGCCCAAC |
| | | | CAGCCTCAAGTTTGGGAGCTGATACAATGTCTGCGGGAGGTGGCGGCCCA |
| | | | TTGGGCGACAATAACCAAGGTGCCGATGGAGTGGGCAATGCCTCGGGAGA |
| | | | TTGGCATTGCGATTCCACGTGGATGGGGGACAGAGTCGTCACCAAGTCCA |
| | | | CCCGAACCTGGGTGCTGCCCAGCTACAACAACCACCAGTACCGAGAGATC |
| | | | AAAAGCGGCTCCGTCGACGGAAGCAACGCCAACGCCTACTTTGGATACAG |
| | | | CACCCCCTGGGGGTACTTTGACTTTAACCGCTTCCACAGCCACTGGAGCC |
| | | | CCCGAGACTGGCAAAGACTCATCAACAACTACTGGGGCTTCAGACCCCGG |
| | | | TCCCTCAGAGTCAAAATCTTCAACATTCAAGTCAAAGAGGTCACGGTGCA |
| | | | GGACTCCACCACCACCATCGCCAACAACCTCACCTCCACCGTCCAAGTGT |
| | | | TTACGGACGACGACTACCAGCTGCCCTACGTCGTCGGCAACGGGACCGAG |
| | | | GGATGCCTGCCGGCCTTCCCTCCGCAGGTCTTTACGCTGCCGCAGTACGG |
| | | | TTACGCGACGCTGAACCGCGACAACACAGAAAATCCCACCGAGAGGAGCA |
| | | | GCTTCTTCTGCCTAGAGTACTTTCCCAGCAAGATGCTGAGAACGGGCAAC |
| | | | AACTTTGAGTTTACCTACAACTTTGAGGAGGTGCCCTTCCACTCCAGCTT |
| | | | CGCTCCCAGTCAGAACCTGTTCAAGCTGGCCAACCCGCTGGTGGACCAGT |
| | | | ACTTGTACCGCTTCGTGAGCACAAATAACACTGGCGGAGTCCAGTTCAAC |
| | | | AAGAACCTGGCCGGGAGATACGCCAACACCTACAAAAACTGGTTCCCGGG |
| | | | GCCCATGGGCCGAACCCAGGGCTGGAACCTGGGCTCCGGGGTCAACCGCG |
| | | | CCAGTGTCAGCGCCTTCGCCACGACCAATAGGATGGAGCTCGAGGGCGCG |
| | | | AGTTACCAGGTGCCCCCGCAGCCGAACGGCATGACCAACAACCTCCAGGG |
| | | | CAGCAACACCTATGCCCTGGAGAACACTATGATCTTCAACAGCCAGCCGG |
| | | | CGAACCCGGGCACCACCGCCACGTACCTCGAGGGCAACATGCTCATCACC |
| | | | AGCGAGAGCGAGACACAGCCGGTGAACCGCGTGGCGTACAACGTCGGCGG |
| | | | GCAGATGGCCACCAACAACCAGAGCTCCACCACTGCCCCCGCGACCGGCA |
| | | | CGTACAACCTCCAGGAAATCGTGCCCGGCAGCGTGTGGATGGAGAGGGAC |
| | | | GTGTACCTCCAAGGACCCATCTGGGCCAAGATCCCAGAGACAGGGGCGCA |
| | | | CTTTCACCCCTCTCCGGCCATGGGCGGATTCGGACTCAAACACCCACCGC |
| | | | CCATGATGCTCATCAAGAACACGCCTGTGCCCGGAAATATCACCAGCTTC |
| | | | TCGGACGTGCCCGTCAGCAGCTTCATCACCCAGTACAGCACCGGGCAGGT |
| | | | CACCGTGGAGATGGAGTGGGAGCTCAAGAAGGAAAACTCCAAGAGGTGGA |
| | | | ACCCAGAGATCCAGTACACAAACAACTACAACGACCCCCAGTTTGTGGAC |
| | | | TTTGCCCCGGACAGCACCGGGGAATACAGAACCACCAGACCTATCGGAAC |
| | | | CCGATACCTTACCCGACCCCTTTAA |
| 79 | 20 | MAAP_aa | MRETTPTSSTTTRTPSFRRSSPTTHPSGETSERQSFRPRKGFSNLLAWLK |
| | | | RVLRRPLPESG* |
| 80 | 20 | MAAP_nt | ATGCGGGAGACAACCCCTACCTCAAGTACAACCACGCGGACGCCGAGTTT |
| | | | CAGGAGAAGCTCGCCGACGACACATCCTTCGGGGGAAACCTCGGAAAGGC |
| | | | AGTCTTTCAGGCCAAGAAAAGGGTTCTCGAACCTTTTGGCCTGGTTGAAG |
| | | | AGGGTGCTAAGACGGCCCCTACCGGAAAGCGGATAG |
| 81 | 21 | VP1_aa | MSFVDHPPDWLEDEVGEGLREWLKLEAGPPKPKPNEQHQDQARGLVLPGY |
| | | | NYLGPGNGLDRGEPVNRADEVAREHDISYNEQLEAGDNPYLKYNHADAEF |
| | | | QEKLADDTSFGGNLGKAVFQAKKRVLEPFGLVEEGAKTAPTGKRIDDHFP |
| | | | KRKKARTEEDSKPSTSSDAEAGPSGSQQLQIPAQPASSLGADTMSAGGGG |
| | | | PLGDNNQGADGVGNASGDWHCDSTWMGDRVVTKSTRTWVLPSYNNHQYRE |
| | | | IKSGSVDGSNANAYFGYSTPWGYFDFNRFHSHWSPRDWQRLINNYWGFRP |
| | | | RSLRVKIFNIQVKEVTVQDSTTTIANNLTSTVQVFTDDDYQLPYVVGNGT |
| | | | EGCLPAFPPQVFTLPQYGYATLNRDNTENPTERSSFFCLEYFPSKMLRTG |
| | | | NNFEFTYNFEEVPFHSSFAPSQNLFKLANPLVDQYLYRFVSTNNTGGVQF |
| | | | NKNLAGRYANTYKNWFPGPMGRTQGWNLGSGVNRASVSAFATTNRMELEG |
| | | | ASYQVPPQPNGMTNNLQGSNTYALENTMIFNSQPANPGTTATYLEGNMLI |
| | | | TSESETQPVNRVAYNVGGQMATNNQSSTTAPATGTYNLQEIVPGSVWMER |
| | | | DVYLQGPIWAKIPETGAHFHPSPAMGGFGLKHPPPMMLIKNTPVPGNITS |
| | | | FSDVPVSSFITQYSTGQVTVEMEWELKKENSKRWNPEIQYTNNYNDPQFV |
| | | | DFAPDSTGEYRTTRPIGTRYLTRPL* |
| 82 | 21 | VP1_nt | ATGTCTTTTGTTGATCACCCTCCAGATTGGTTGGAAGATGAAGTTGGTGA |
| | | | AGGCCTTCGCGAGTGGTTGAAGCTGGAAGCGGGCCCACCGAAACCAAAAC |
| | | | CCAATGAGCAGCATCAAGATCAAGCCCGTGGTCTTGTGCTGCCTGGTTAT |
| | | | AACTATCTCGGACCCGGAAACGGGCTCGATCGAGGAGAGCCTGTCAACAG |
| | | | GGCAGACGAGGTCGCGCGAGAGCACGACATCTCGTACAACGAGCAGCTTG |
| | | | AGGCGGGAGACAACCCCTACCTCAAGTACAACCACGCGGACGCCGAGTTT |
| | | | CAGGAGAAGCTCGCCGACGACACATCCTTCGGGGGAAACCTCGGAAAGGC |
| | | | AGTCTTTCAGGCCAAGAAAAGGGTTCTCGAACCTTTTGGCCTGGTTGAAG |
| | | | AGGGTGCTAAGACGGCCCCTACCGGAAAGCGGATAGACGACCACTTTCCA |
| | | | AAAAGAAAGAAGGCTCGGACCGAAGAGGACTCCAAGCCTTCCACCTCGTC |
| | | | AGACGCCGAAGCTGGACCCAGCGGATCCCAGCAGCTGCAAATCCCAGCCC |
| | | | AACCAGCCTCAAGTTTGGGAGCTGATACAATGTCTGCGGGAGGTGGCGGC |
| | | | CCATTGGGCGACAATAACCAAGGTGCCGATGGAGTGGGCAATGCCTCGGG |
| | | | AGATTGGCATTGCGATTCCACGTGGATGGGGGACAGAGTCGTCACCAAGT |
| | | | CCACCCGAACCTGGGTGCTGCCCAGCTACAACAACCACCAGTACCGAGAG |
| | | | ATCAAAAGCGGCTCCGTCGACGGAAGCAACGCCAACGCCTACTTTGGATA |
| | | | CAGCACCCCCTGGGGGTACTTTGACTTTAACCGCTTCCACAGCCACTGGA |
| | | | GCCCCCGAGACTGGCAAAGACTCATCAACAACTACTGGGGCTTCAGACCC |
| | | | CGGTCCCTCAGAGTCAAAATCTTCAACATTCAAGTCAAAGAGGTCACGGT |
| | | | GCAGGACTCCACCACCACCATCGCCAACAACCTCACCTCCACCGTCCAAG |
| | | | TGTTTACGGACGACGACTACCAGCTGCCCTACGTCGTCGGCAACGGGACC |
| | | | GAGGGATGCCTGCCGGCCTTCCCTCCGCAGGTCTTTACGCTGCCGCAGTA |
| | | | CGGTTACGCGACGCTGAACCGCGACAACACAGAAAATCCCACCGAGAGGA |
| | | | GCAGCTTCTTCTGCCTAGAGTACTTTCCCAGCAAGATGCTGAGAACGGGC |
| | | | AACAACTTTGAGTTTACCTACAACTTTGAGGAGGTGCCCTTCCACTCCAG |
| | | | CTTCGCTCCCAGTCAGAACCTGTTCAAGCTGGCCAACCCGCTGGTGGACC |
| | | | AGTACTTGTACCGCTTCGTGAGCACAAATAACACTGGCGGAGTCCAGTTC |
| | | | AACAAGAACCTGGCCGGGAGATACGCCAACACCTACAAAAACTGGTTCCC |
| | | | GGGGCCCATGGGCCGAACCCAGGGCTGGAACCTGGGCTCCGGGGTCAACC |
| | | | GCGCCAGTGTCAGCGCCTTCGCCACGACCAATAGGATGGAGCTCGAGGGC |
| | | | GCGAGTTACCAGGTGCCCCCGCAGCCGAACGGCATGACCAACAACCTCCA |
| | | | GGGCAGCAACACCTATGCCCTGGAGAACACTATGATCTTCAACAGCCAGC |
| | | | CGGCGAACCCGGGCACCACCGCCACGTACCTCGAGGGCAACATGCTCATC |
| | | | ACCAGCGAGAGCGAGACACAGCCGGTGAACCGCGTGGCGTACAACGTCGG |
| | | | CGGGCAGATGGCCACCAACAACCAGAGCTCCACCACTGCCCCCGCGACCG |
| | | | GCACGTACAACCTCCAGGAAATCGTGCCCGGCAGCGTGTGGATGGAGAGG |
| | | | GACGTGTACCTCCAAGGACCCATCTGGGCCAAGATCCCAGAGACAGGGGC |
| | | | GCACTTTCACCCCTCTCCGGCCATGGGCGGATTCGGACTCAAACACCCAC |
| | | | CGCCCATGATGCTCATCAAGAACACGCCTGTGCCCGGAAATATCACCAGC |
| | | | TTCTCGGACGTGCCCGTCAGCAGCTTCATCACCCAGTACAGCACCGGGCA |
| | | | GGTCACCGTGGAGATGGAGTGGGAGCTCAAGAAGGAAAACTCCAAGAGGT |
| | | | GGAACCCAGAGATCCAGTACACAAACAACTACAACGACCCCCAGTTTGTG |
| | | | GACTTTGCCCCGGACAGCACCGGGGAATACAGAACCACCAGACCTATCGG |
| | | | AACCCGATACCTTACCCGACCCCTTTAA |
| 83 | 21 | MAAP_aa | MSSIKIKPVVLCCLVITISDPETGSIEESLSTGQTRSRESTTSRTTSSLR |
| | | | RETTPTSSTTTRTPSFRRSSPTTHPSGETSERQSFRPRKGFSNLLAWLKR |
| | | | VLRRPLPESG* |
| 84 | 21 | MAAP_nt | ATGAGCAGCATCAAGATCAAGCCCGTGGTCTTGTGCTGCCTGGTTATAAC |
| | | | TATCTCGGACCCGGAAACGGGCTCGATCGAGGAGAGCCTGTCAACAGGGC |
| | | | AGACGAGGTCGCGCGAGAGCACGACATCTCGTACAACGAGCAGCTTGAGG |
| | | | CGGGAGACAACCCCTACCTCAAGTACAACCACGCGGACGCCGAGTTTCAG |
| | | | GAGAAGCTCGCCGACGACACATCCTTCGGGGGAAACCTCGGAAAGGCAGT |
| | | | CTTTCAGGCCAAGAAAAGGGTTCTCGAACCTTTTGGCCTGGTTGAAGAGG |
| | | | GTGCTAAGACGGCCCCTACCGGAAAGCGGATAG |
| 85 | 22 | VP1_aa | MSFVDHPPDWLEEVGDGLREFLGLEAGPPKPKPSQQHQDQARGLVLPGYN |
| | | | YLGPGNGLDRGEPVNRADEVAREHDISYNEQLEAGDNPYLKYNHADAEFQ |
| | | | EKLADDTSFGGNLGKAVFQAKKRVLEPFGLVEEGAKTAPTGKRIDDHFPK |
| | | | RKKARTEEDSKPSTSSDAEAGPSGSQQLQIPAQPASSLGADTMSAGGGGP |
| | | | LGDNNQGADGVGNASGDWHCDSTWMGDRVVTKSTRTWVLPSYNNHQYREI |
| | | | KSGSVDGSNANAYFGYSTPWGYFDFNRFHSHWSPRDWQRLINNYWGFRPR |
| | | | SLRVKIFNIQVKEVTVQDSTTTIANNLTSTVQVFTDDDYQLPYVVGNGTE |
| | | | GCLPAFPPQVFTLPQYGYATLNRDNTENPTERSSFFCLEYFPSKMLRTGN |
| | | | NFEFTYNFEEVPFHSSFAPSQNLFKLANPLVDQYLYRFVSTNNTGGVQFN |
| | | | KNLAGRYANTYKNWFPGPMGRTQGWNLGSGVNRASVSAFATTNRMELEGA |
| | | | SYQVPPQPNGMTNNLQGSNTYALENTMIFNSQPANPGTTATYLEGNMLIT |
| | | | SESETQPVNRVAYNVGGQMATNNQSSTTAPATGTYNLQEIVPGSVWMERD |
| | | | VYLQGPIWAKIPETGAHFHPSPAMGGFGLKHPPPMMLIKNTPVPGNITSF |
| | | | SDVPVSSFITQYSTGQVTVEMEWELKKENSKRWNPEIQYTNNYNDPQFVD |
| | | | FAPDSTGEYRTTRPIGTRYLTRPL* |
| 86 | 22 | VP1_nt | ATGTCTTTTGTTGATCACCCTCCAGATTGGTTGGAAGAAGTTGGTGATGG |
| | | | TCTGCGCGAGTTTTTGGGCCTTGAAGCGGGCCCACCGAAACCAAAACCCT |
| | | | CTCAGCAGCATCAAGATCAAGCCCGTGGTCTTGTGCTGCCTGGTTATAAC |
| | | | TATCTCGGACCCGGAAACGGGCTCGATCGAGGAGAGCCTGTCAACAGGGC |
| | | | AGACGAGGTCGCGCGAGAGCACGACATCTCGTACAACGAGCAGCTTGAGG |
| | | | CGGGAGACAACCCCTACCTCAAGTACAACCACGCGGACGCCGAGTTTCAG |
| | | | GAGAAGCTCGCCGACGACACATCCTTCGGGGGAAACCTCGGAAAGGCAGT |
| | | | CTTTCAGGCCAAGAAAAGGGTTCTCGAACCTTTTGGCCTGGTTGAAGAGG |
| | | | GTGCTAAGACGGCCCCTACCGGAAAGCGGATAGACGACCACTTTCCAAAA |
| | | | AGAAAGAAGGCTCGGACCGAAGAGGACTCCAAGCCTTCCACCTCGTCAGA |
| | | | CGCCGAAGCTGGACCCAGCGGATCCCAGCAGCTGCAAATCCCAGCCCAAC |
| | | | CAGCCTCAAGTTTGGGAGCTGATACAATGTCTGCGGGAGGTGGCGGCCCA |
| | | | TTGGGCGACAATAACCAAGGTGCCGATGGAGTGGGCAATGCCTCGGGAGA |
| | | | TTGGCATTGCGATTCCACGTGGATGGGGGACAGAGTCGTCACCAAGTCCA |
| | | | CCCGAACCTGGGTGCTGCCCAGCTACAACAACCACCAGTACCGAGAGATC |
| | | | AAAAGCGGCTCCGTCGACGGAAGCAACGCCAACGCCTACTTTGGATACAG |
| | | | CACCCCCTGGGGGTACTTTGACTTTAACCGCTTCCACAGCCACTGGAGCC |
| | | | CCCGAGACTGGCAAAGACTCATCAACAACTACTGGGGCTTCAGACCCCGG |
| | | | TCCCTCAGAGTCAAAATCTTCAACATTCAAGTCAAAGAGGTCACGGTGCA |
| | | | GGACTCCACCACCACCATCGCCAACAACCTCACCTCCACCGTCCAAGTGT |
| | | | TTACGGACGACGACTACCAGCTGCCCTACGTCGTCGGCAACGGGACCGAG |
| | | | GGATGCCTGCCGGCCTTCCCTCCGCAGGTCTTTACGCTGCCGCAGTACGG |
| | | | TTACGCGACGCTGAACCGCGACAACACAGAAAATCCCACCGAGAGGAGCA |
| | | | GCTTCTTCTGCCTAGAGTACTTTCCCAGCAAGATGCTGAGAACGGGCAAC |
| | | | AACTTTGAGTTTACCTACAACTTTGAGGAGGTGCCCTTCCACTCCAGCTT |
| | | | CGCTCCCAGTCAGAACCTGTTCAAGCTGGCCAACCCGCTGGTGGACCAGT |
| | | | ACTTGTACCGCTTCGTGAGCACAAATAACACTGGCGGAGTCCAGTTCAAC |
| | | | AAGAACCTGGCCGGGAGATACGCCAACACCTACAAAAACTGGTTCCCGGG |
| | | | GCCCATGGGCCGAACCCAGGGCTGGAACCTGGGCTCCGGGGTCAACCGCG |
| | | | CCAGTGTCAGCGCCTTCGCCACGACCAATAGGATGGAGCTCGAGGGCGCG |
| | | | AGTTACCAGGTGCCCCCGCAGCCGAACGGCATGACCAACAACCTCCAGGG |
| | | | CAGCAACACCTATGCCCTGGAGAACACTATGATCTTCAACAGCCAGCCGG |
| | | | CGAACCCGGGCACCACCGCCACGTACCTCGAGGGCAACATGCTCATCACC |
| | | | AGCGAGAGCGAGACACAGCCGGTGAACCGCGTGGCGTACAACGTCGGCGG |
| | | | GCAGATGGCCACCAACAACCAGAGCTCCACCACTGCCCCCGCGACCGGCA |
| | | | CGTACAACCTCCAGGAAATCGTGCCCGGCAGCGTGTGGATGGAGAGGGAC |
| | | | GTGTACCTCCAAGGACCCATCTGGGCCAAGATCCCAGAGACAGGGGCGCA |
| | | | CTTTCACCCCTCTCCGGCCATGGGCGGATTCGGACTCAAACACCCACCGC |
| | | | CCATGATGCTCATCAAGAACACGCCTGTGCCCGGAAATATCACCAGCTTC |
| | | | TCGGACGTGCCCGTCAGCAGCTTCATCACCCAGTACAGCACCGGGCAGGT |
| | | | CACCGTGGAGATGGAGTGGGAGCTCAAGAAGGAAAACTCCAAGAGGTGGA |
| | | | ACCCAGAGATCCAGTACACAAACAACTACAACGACCCCCAGTTTGTGGAC |
| | | | TTTGCCCCGGACAGCACCGGGGAATACAGAACCACCAGACCTATCGGAAC |
| | | | CCGATACCTTACCCGACCCCTTTAA |
| 87 | 22 | MAAP_aa | MVCASFWALKRAHRNQNPLSSIKIKPVVLCCLVITISDPETGSIEESLST |
| | | | GQTRSRESTTSRTTSSLRRETTPTSSTTTRTPSFRRSSPTTHPSGETSER |
| | | | QSFRPRKGFSNLLAWLKRVLRRPLPESG* |
| 88 | 22 | MAAP_nt | ATGGTCTGCGCGAGTTTTTGGGCCTTGAAGCGGGCCCACCGAAACCAAAA |
| | | | CCCTCTCAGCAGCATCAAGATCAAGCCCGTGGTCTTGTGCTGCCTGGTTA |
| | | | TAACTATCTCGGACCCGGAAACGGGCTCGATCGAGGAGAGCCTGTCAACA |
| | | | GGGCAGACGAGGTCGCGCGAGAGCACGACATCTCGTACAACGAGCAGCTT |
| | | | GAGGCGGGAGACAACCCCTACCTCAAGTACAACCACGCGGACGCCGAGTT |
| | | | TCAGGAGAAGCTCGCCGACGACACATCCTTCGGGGGAAACCTCGGAAAGG |
| | | | CAGTCTTTCAGGCCAAGAAAAGGGTTCTCGAACCTTTTGGCCTGGTTGAA |
| | | | GAGGGTGCTAAGACGGCCCCTACCGGAAAGCGGATAG |
| 89 | 23 | VP1_aa | MSFVDHPPDWLHEVGEGLREFLGLHAGPPKPKPNQQHQDQARGLVLPGYN |
| | | | YLGPGNGLDRGEPVNRADEVAREHDISYNEQLEAGDNPYLKYNHADAEFQ |
| | | | EKLADDTSFGGNLGKAVFQAKKRVLEPFGLVEEGAKTAPTGKRIDDHFPK |
| | | | RKKARTEEDSKPSTSSDAEAGPSGSQQLQIPAQPASSLGADTMSAGGGGP |
| | | | LGDNNQGADGVGNASGDWHCDSTWMGDRVVTKSTRTWVLPSYNNHQYREI |
| | | | KSGSVDGSNANAYFGYSTPWGYFDFNRFHSHWSPRDWQRLINNYWGFRPR |
| | | | SLRVKIFNIQVKEVTVQDSTTTIANNLTSTVQVFTDDDYQLPYVVGNGTE |
| | | | GCLPAFPPQVFTLPQYGYATLNRDNTENPTERSSFFCLEYFPSKMLRTGN |
| | | | NFEFTYNFEEVPFHSSFAPSQNLFKLANPLVDQYLYRFVSTNNTGGVQFN |
| | | | KNLAGRYANTYKNWFPGPMGRTQGWNLGSGVNRASVSAFATTNRMELEGA |
| | | | SYQVPPQPNGMTNNLQGSNTYALENTMIFNSQPANPGTTATYLEGNMLIT |
| | | | SESETQPVNRVAYNVGGQMATNNQSSTTAPATGTYNLQEIVPGSVWMERD |
| | | | VYLQGPIWAKIPETGAHFHPSPAMGGFGLKHPPPMMLIKNTPVPGNITSF |
| | | | SDVPVSSFITQYSTGQVTVEMEWELKKENSKRWNPEIQYTNNYNDPQFVD |
| | | | FAPDSTGEYRTTRPIGTRYLTRPL* |
| 90 | 23 | VP1_nt | ATGTCTTTTGTTGATCACCCTCCAGATTGGTTGCATGAAGTTGGTGAAGG |
| | | | GCTTCGCGAGTTTTTGGGCCTTCACGCGGGCCCACCGAAACCAAAACCCA |
| | | | ATCAGCAGCATCAAGATCAAGCCCGTGGTCTTGTGCTGCCTGGTTATAAC |
| | | | TATCTCGGACCCGGAAACGGGCTCGATCGAGGAGAGCCTGTCAACAGGGC |
| | | | AGACGAGGTCGCGCGAGAGCACGACATCTCGTACAACGAGCAGCTTGAGG |
| | | | CGGGAGACAACCCCTACCTCAAGTACAACCACGCGGACGCCGAGTTTCAG |
| | | | GAGAAGCTCGCCGACGACACATCCTTCGGGGGAAACCTCGGAAAGGCAGT |
| | | | CTTTCAGGCCAAGAAAAGGGTTCTCGAACCTTTTGGCCTGGTTGAAGAGG |
| | | | GTGCTAAGACGGCCCCTACCGGAAAGCGGATAGACGACCACTTTCCAAAA |
| | | | AGAAAGAAGGCTCGGACCGAAGAGGACTCCAAGCCTTCCACCTCGTCAGA |
| | | | CGCCGAAGCTGGACCCAGCGGATCCCAGCAGCTGCAAATCCCAGCCCAAC |
| | | | CAGCCTCAAGTTTGGGAGCTGATACAATGTCTGCGGGAGGTGGCGGCCCA |
| | | | TTGGGCGACAATAACCAAGGTGCCGATGGAGTGGGCAATGCCTCGGGAGA |
| | | | TTGGCATTGCGATTCCACGTGGATGGGGGACAGAGTCGTCACCAAGTCCA |
| | | | CCCGAACCTGGGTGCTGCCCAGCTACAACAACCACCAGTACCGAGAGATC |
| | | | AAAAGCGGCTCCGTCGACGGAAGCAACGCCAACGCCTACTTTGGATACAG |
| | | | CACCCCCTGGGGGTACTTTGACTTTAACCGCTTCCACAGCCACTGGAGCC |
| | | | CCCGAGACTGGCAAAGACTCATCAACAACTACTGGGGCTTCAGACCCCGG |
| | | | TCCCTCAGAGTCAAAATCTTCAACATTCAAGTCAAAGAGGTCACGGTGCA |
| | | | GGACTCCACCACCACCATCGCCAACAACCTCACCTCCACCGTCCAAGTGT |
| | | | TTACGGACGACGACTACCAGCTGCCCTACGTCGTCGGCAACGGGACCGAG |
| | | | GGATGCCTGCCGGCCTTCCCTCCGCAGGTCTTTACGCTGCCGCAGTACGG |
| | | | TTACGCGACGCTGAACCGCGACAACACAGAAAATCCCACCGAGAGGAGCA |
| | | | GCTTCTTCTGCCTAGAGTACTTTCCCAGCAAGATGCTGAGAACGGGCAAC |
| | | | AACTTTGAGTTTACCTACAACTTTGAGGAGGTGCCCTTCCACTCCAGCTT |
| | | | CGCTCCCAGTCAGAACCTGTTCAAGCTGGCCAACCCGCTGGTGGACCAGT |
| | | | ACTTGTACCGCTTCGTGAGCACAAATAACACTGGCGGAGTCCAGTTCAAC |
| | | | AAGAACCTGGCCGGGAGATACGCCAACACCTACAAAAACTGGTTCCCGGG |
| | | | GCCCATGGGCCGAACCCAGGGCTGGAACCTGGGCTCCGGGGTCAACCGCG |
| | | | CCAGTGTCAGCGCCTTCGCCACGACCAATAGGATGGAGCTCGAGGGCGCG |
| | | | AGTTACCAGGTGCCCCCGCAGCCGAACGGCATGACCAACAACCTCCAGGG |
| | | | CAGCAACACCTATGCCCTGGAGAACACTATGATCTTCAACAGCCAGCCGG |
| | | | CGAACCCGGGCACCACCGCCACGTACCTCGAGGGCAACATGCTCATCACC |
| | | | AGCGAGAGCGAGACACAGCCGGTGAACCGCGTGGCGTACAACGTCGGCGG |
| | | | GCAGATGGCCACCAACAACCAGAGCTCCACCACTGCCCCCGCGACCGGCA |
| | | | CGTACAACCTCCAGGAAATCGTGCCCGGCAGCGTGTGGATGGAGAGGGAC |
| | | | GTGTACCTCCAAGGACCCATCTGGGCCAAGATCCCAGAGACAGGGGCGCA |
| | | | CTTTCACCCCTCTCCGGCCATGGGCGGATTCGGACTCAAACACCCACCGC |
| | | | CCATGATGCTCATCAAGAACACGCCTGTGCCCGGAAATATCACCAGCTTC |
| | | | TCGGACGTGCCCGTCAGCAGCTTCATCACCCAGTACAGCACCGGGCAGGT |
| | | | CACCGTGGAGATGGAGTGGGAGCTCAAGAAGGAAAACTCCAAGAGGTGGA |
| | | | ACCCAGAGATCCAGTACACAAACAACTACAACGACCCCCAGTTTGTGGAC |
| | | | TTTGCCCCGGACAGCACCGGGGAATACAGAACCACCAGACCTATCGGAAC |
| | | | CCGATACCTTACCCGACCCCTTTAA |
| 91 | 23 | MAAP_aa | MKLVKGFASFWAFTRAHRNQNPISSIKIKPVVLCCLVITISDPETGSIEE |
| | | | SLSTGQTRSRESTTSRTTSSLRRETTPTSSTTTRTPSFRRSSPTTHPSGE |
| | | | TSERQSFRPRKGFSNLLAWLKRVLRRPLPESG* |
| 92 | 23 | MAAP_nt | ATGAAGTTGGTGAAGGGCTTCGCGAGTTTTTGGGCCTTCACGCGGGCCCA |
| | | | CCGAAACCAAAACCCAATCAGCAGCATCAAGATCAAGCCCGTGGTCTTGT |
| | | | GCTGCCTGGTTATAACTATCTCGGACCCGGAAACGGGCTCGATCGAGGAG |
| | | | AGCCTGTCAACAGGGCAGACGAGGTCGCGCGAGAGCACGACATCTCGTAC |
| | | | AACGAGCAGCTTGAGGCGGGAGACAACCCCTACCTCAAGTACAACCACGC |
| | | | GGACGCCGAGTTTCAGGAGAAGCTCGCCGACGACACATCCTTCGGGGGAA |
| | | | ACCTCGGAAAGGCAGTCTTTCAGGCCAAGAAAAGGGTTCTCGAACCTTTT |
| | | | GGCCTGGTTGAAGAGGGTGCTAAGACGGCCCCTACCGGAAAGCGGATAG |
| 93 | 24 | VP1_aa | MSFVDHPPDWLEEVGEGLREFLGLEAGPPKPKPNQQHYDQARGLVLPGYN |
| | | | YLGPGNGLDRGEPVNRADEVAREHDISYNEQLEAGDNPYLKYNHADAEFQ |
| | | | EKLADDTSFGGNLGKAVFQAKKRVLEPFGLVEEGAKTAPTGKRIDDHFPK |
| | | | RKKARTEEDSKPSTSSDAEAGPSGSQQLQIPAQPASSLGADTMSAGGGGP |
| | | | LGDNNQGADGVGNASGDWHCDSTWMGDRVVTKSTRTWVLPSYNNHQYREI |
| | | | KSGSVDGSNANAYFGYSTPWGYFDFNRFHSHWSPRDWQRLINNYWGFRPR |
| | | | SLRVKIFNIQVKEVTVQDSTTTIANNLTSTVQVFTDDDYQLPYVVGNGTE |
| | | | GCLPAFPPQVFTLPQYGYATLNRDNTENPTERSSFFCLEYFPSKMLRTGN |
| | | | NFEFTYNFEEVPFHSSFAPSQNLFKLANPLVDQYLYRFVSTNNTGGVQFN |
| | | | KNLAGRYANTYKNWFPGPMGRTQGWNLGSGVNRASVSAFATTNRMELEGA |
| | | | SYQVPPQPNGMTNNLQGSNTYALENTMIFNSQPANPGTTATYLEGNMLIT |
| | | | SESETQPVNRVAYNVGGQMATNNQSSTTAPATGTYNLQEIVPGSVWMERD |
| | | | VYLQGPIWAKIPETGAHFHPSPAMGGFGLKHPPPMMLIKNTPVPGNITSF |
| | | | SDVPVSSFITQYSTGQVTVEMEWELKKENSKRWNPEIQYTNNYNDPQFVD |
| | | | FAPDSTGEYRTTRPIGTRYLTRPL* |
| 94 | 24 | VP1_nt | ATGTCTTTTGTTGATCACCCTCCAGATTGGTTGGAAGAAGTTGGTGAAGG |
| | | | TCTTCGCGAGTTTTTGGGCCTTGAAGCGGGCCCACCGAAACCAAAACCCA |
| | | | ATCAGCAGCATTATGATCAAGCCCGTGGTCTTGTGCTGCCTGGTTATAAC |
| | | | TATCTCGGACCCGGAAACGGGCTCGATCGAGGAGAGCCTGTCAACAGGGC |
| | | | AGACGAGGTCGCGCGAGAGCACGACATCTCGTACAACGAGCAGCTTGAGG |
| | | | CGGGAGACAACCCCTACCTCAAGTACAACCACGCGGACGCCGAGTTTCAG |
| | | | GAGAAGCTCGCCGACGACACATCCTTCGGGGGAAACCTCGGAAAGGCAGT |
| | | | CTTTCAGGCCAAGAAAAGGGTTCTCGAACCTTTTGGCCTGGTTGAAGAGG |
| | | | GTGCTAAGACGGCCCCTACCGGAAAGCGGATAGACGACCACTTTCCAAAA |
| | | | AGAAAGAAGGCTCGGACCGAAGAGGACTCCAAGCCTTCCACCTCGTCAGA |
| | | | CGCCGAAGCTGGACCCAGCGGATCCCAGCAGCTGCAAATCCCAGCCCAAC |
| | | | CAGCCTCAAGTTTGGGAGCTGATACAATGTCTGCGGGAGGTGGCGGCCCA |
| | | | TTGGGCGACAATAACCAAGGTGCCGATGGAGTGGGCAATGCCTCGGGAGA |
| | | | TTGGCATTGCGATTCCACGTGGATGGGGGACAGAGTCGTCACCAAGTCCA |
| | | | CCCGAACCTGGGTGCTGCCCAGCTACAACAACCACCAGTACCGAGAGATC |
| | | | AAAAGCGGCTCCGTCGACGGAAGCAACGCCAACGCCTACTTTGGATACAG |
| | | | CACCCCCTGGGGGTACTTTGACTTTAACCGCTTCCACAGCCACTGGAGCC |
| | | | CCCGAGACTGGCAAAGACTCATCAACAACTACTGGGGCTTCAGACCCCGG |
| | | | TCCCTCAGAGTCAAAATCTTCAACATTCAAGTCAAAGAGGTCACGGTGCA |
| | | | GGACTCCACCACCACCATCGCCAACAACCTCACCTCCACCGTCCAAGTGT |
| | | | TTACGGACGACGACTACCAGCTGCCCTACGTCGTCGGCAACGGGACCGAG |
| | | | GGATGCCTGCCGGCCTTCCCTCCGCAGGTCTTTACGCTGCCGCAGTACGG |
| | | | TTACGCGACGCTGAACCGCGACAACACAGAAAATCCCACCGAGAGGAGCA |
| | | | GCTTCTTCTGCCTAGAGTACTTTCCCAGCAAGATGCTGAGAACGGGCAAC |
| | | | AACTTTGAGTTTACCTACAACTTTGAGGAGGTGCCCTTCCACTCCAGCTT |
| | | | CGCTCCCAGTCAGAACCTGTTCAAGCTGGCCAACCCGCTGGTGGACCAGT |
| | | | ACTTGTACCGCTTCGTGAGCACAAATAACACTGGCGGAGTCCAGTTCAAC |
| | | | AAGAACCTGGCCGGGAGATACGCCAACACCTACAAAAACTGGTTCCCGGG |
| | | | GCCCATGGGCCGAACCCAGGGCTGGAACCTGGGCTCCGGGGTCAACCGCG |
| | | | CCAGTGTCAGCGCCTTCGCCACGACCAATAGGATGGAGCTCGAGGGCGCG |
| | | | AGTTACCAGGTGCCCCCGCAGCCGAACGGCATGACCAACAACCTCCAGGG |
| | | | CAGCAACACCTATGCCCTGGAGAACACTATGATCTTCAACAGCCAGCCGG |
| | | | CGAACCCGGGCACCACCGCCACGTACCTCGAGGGCAACATGCTCATCACC |
| | | | AGCGAGAGCGAGACACAGCCGGTGAACCGCGTGGCGTACAACGTCGGCGG |
| | | | GCAGATGGCCACCAACAACCAGAGCTCCACCACTGCCCCCGCGACCGGCA |
| | | | CGTACAACCTCCAGGAAATCGTGCCCGGCAGCGTGTGGATGGAGAGGGAC |
| | | | GTGTACCTCCAAGGACCCATCTGGGCCAAGATCCCAGAGACAGGGGCGCA |
| | | | CTTTCACCCCTCTCCGGCCATGGGCGGATTCGGACTCAAACACCCACCGC |
| | | | CCATGATGCTCATCAAGAACACGCCTGTGCCCGGAAATATCACCAGCTTC |
| | | | TCGGACGTGCCCGTCAGCAGCTTCATCACCCAGTACAGCACCGGGCAGGT |
| | | | CACCGTGGAGATGGAGTGGGAGCTCAAGAAGGAAAACTCCAAGAGGTGGA |
| | | | ACCCAGAGATCCAGTACACAAACAACTACAACGACCCCCAGTTTGTGGAC |
| | | | TTTGCCCCGGACAGCACCGGGGAATACAGAACCACCAGACCTATCGGAAC |
| | | | CCGATACCTTACCCGACCCCTTTAA |
| 95 | 24 | MAAP_aa | MIKPVVLCCLVITISDPETGSIEESLSTGQTRSRESTTSRTTSSLRRETT |
| | | | PTSSTTTRTPSFRRSSPTTHPSGETSERQSFRPRKGFSNLLAWLKRVLRR |
| | | | PLPESG* |
| 96 | 24 | MAAP_nt | ATGATCAAGCCCGTGGTCTTGTGCTGCCTGGTTATAACTATCTCGGACCC |
| | | | GGAAACGGGCTCGATCGAGGAGAGCCTGTCAACAGGGCAGACGAGGTCGC |
| | | | GCGAGAGCACGACATCTCGTACAACGAGCAGCTTGAGGCGGGAGACAACC |
| | | | CCTACCTCAAGTACAACCACGCGGACGCCGAGTTTCAGGAGAAGCTCGCC |
| | | | GACGACACATCCTTCGGGGGAAACCTCGGAAAGGCAGTCTTTCAGGCCAA |
| | | | GAAAAGGGTTCTCGAACCTTTTGGCCTGGTTGAAGAGGGTGCTAAGACGG |
| | | | CCCCTACCGGAAAGCGGATAG |
| 97 | 25 | VP1_aa | MSFVDHPPDWLEEVGEGLREFLGLEAGPPKPKPNQQHQDQARGLVLPGYN |
| | | | YLGPGNGLDRGEPVNEADAAAREHDISYNEQLDAGDNPYLKYNHADAEFQ |
| | | | EKLADDTSFGGNLGKAVFQAKKRVLEPFGLVEEGAKTAPTGKRIDDHFPK |
| | | | RKKARTEEDSKPSTSSDAEAGPSGSQQLQIPAQPASSLGADTMSAGGGGP |
| | | | LGDNNQGADGVGNASGDWHCDSTWMGDRVVTKSTRTWVLPSYNNHQYREI |
| | | | KSGSVDGSNANAYFGYSTPWGYFDFNRFHSHWSPRDWQRLINNYWGFRPR |
| | | | SLRVKIFNIQVKEVTVQDSTTTIANNLTSTVQVFTDDDYQLPYVVGNGTE |
| | | | GCLPAFPPQVFTLPQYGYATLNRDNTENPTERSSFFCLEYFPSKMLRTGN |
| | | | NFEFTYNFEEVPFHSSFAPSQNLFKLANPLVDQYLYRFVSTNNTGGVQFN |
| | | | KNLAGRYANTYKNWFPGPMGRTQGWNLGSGVNRASVSAFATTNRMELEGA |
| | | | SYQVPPQPNGMTNNLQGSNTYALENTMIFNSQPANPGTTATYLEGNMLIT |
| | | | SESETQPVNRVAYNVGGQMATNNQSSTTAPATGTYNLQEIVPGSVWMERD |
| | | | VYLQGPIWAKIPETGAHFHPSPAMGGFGLKHPPPMMLIKNTPVPGNITSF |
| | | | SDVPVSSFITQYSTGQVTVEMEWELKKENSKRWNPEIQYTNNYNDPQFVD |
| | | | FAPDSTGEYRTTRPIGTRYLTRPL* |
| 98 | 25 | VP1_nt | ATGTCTTTTGTTGATCACCCTCCAGATTGGTTGGAAGAAGTTGGTGAAGG |
| | | | TCTTCGCGAGTTTTTGGGCCTTGAAGCGGGCCCACCGAAACCAAAACCCA |
| | | | ATCAGCAGCATCAAGATCAAGCCCGTGGTCTTGTGCTGCCTGGTTATAAC |
| | | | TATCTCGGACCCGGAAACGGGCTCGATCGAGGAGAGCCTGTCAACGAAGC |
| | | | AGACGCCGCAGCGCGAGAGCACGACATCTCGTACAACGAGCAGCTTGATG |
| | | | CGGGAGACAACCCCTACCTCAAGTACAACCACGCGGACGCCGAGTTTCAG |
| | | | GAGAAGCTCGCCGACGACACATCCTTCGGGGGAAACCTCGGAAAGGCAGT |
| | | | CTTTCAGGCCAAGAAAAGGGTTCTCGAACCTTTTGGCCTGGTTGAAGAGG |
| | | | GTGCTAAGACGGCCCCTACCGGAAAGCGGATAGACGACCACTTTCCAAAA |
| | | | AGAAAGAAGGCTCGGACCGAAGAGGACTCCAAGCCTTCCACCTCGTCAGA |
| | | | CGCCGAAGCTGGACCCAGCGGATCCCAGCAGCTGCAAATCCCAGCCCAAC |
| | | | CAGCCTCAAGTTTGGGAGCTGATACAATGTCTGCGGGAGGTGGCGGCCCA |
| | | | TTGGGCGACAATAACCAAGGTGCCGATGGAGTGGGCAATGCCTCGGGAGA |
| | | | TTGGCATTGCGATTCCACGTGGATGGGGGACAGAGTCGTCACCAAGTCCA |
| | | | CCCGAACCTGGGTGCTGCCCAGCTACAACAACCACCAGTACCGAGAGATC |
| | | | AAAAGCGGCTCCGTCGACGGAAGCAACGCCAACGCCTACTTTGGATACAG |
| | | | CACCCCCTGGGGGTACTTTGACTTTAACCGCTTCCACAGCCACTGGAGCC |
| | | | CCCGAGACTGGCAAAGACTCATCAACAACTACTGGGGCTTCAGACCCCGG |
| | | | TCCCTCAGAGTCAAAATCTTCAACATTCAAGTCAAAGAGGTCACGGTGCA |
| | | | GGACTCCACCACCACCATCGCCAACAACCTCACCTCCACCGTCCAAGTGT |
| | | | TTACGGACGACGACTACCAGCTGCCCTACGTCGTCGGCAACGGGACCGAG |
| | | | GGATGCCTGCCGGCCTTCCCTCCGCAGGTCTTTACGCTGCCGCAGTACGG |
| | | | TTACGCGACGCTGAACCGCGACAACACAGAAAATCCCACCGAGAGGAGCA |
| | | | GCTTCTTCTGCCTAGAGTACTTTCCCAGCAAGATGCTGAGAACGGGCAAC |
| | | | AACTTTGAGTTTACCTACAACTTTGAGGAGGTGCCCTTCCACTCCAGCTT |
| | | | CGCTCCCAGTCAGAACCTGTTCAAGCTGGCCAACCCGCTGGTGGACCAGT |
| | | | ACTTGTACCGCTTCGTGAGCACAAATAACACTGGCGGAGTCCAGTTCAAC |
| | | | AAGAACCTGGCCGGGAGATACGCCAACACCTACAAAAACTGGTTCCCGGG |
| | | | GCCCATGGGCCGAACCCAGGGCTGGAACCTGGGCTCCGGGGTCAACCGCG |
| | | | CCAGTGTCAGCGCCTTCGCCACGACCAATAGGATGGAGCTCGAGGGCGCG |
| | | | AGTTACCAGGTGCCCCCGCAGCCGAACGGCATGACCAACAACCTCCAGGG |
| | | | CAGCAACACCTATGCCCTGGAGAACACTATGATCTTCAACAGCCAGCCGG |
| | | | CGAACCCGGGCACCACCGCCACGTACCTCGAGGGCAACATGCTCATCACC |
| | | | AGCGAGAGCGAGACACAGCCGGTGAACCGCGTGGCGTACAACGTCGGCGG |
| | | | GCAGATGGCCACCAACAACCAGAGCTCCACCACTGCCCCCGCGACCGGCA |
| | | | CGTACAACCTCCAGGAAATCGTGCCCGGCAGCGTGTGGATGGAGAGGGAC |
| | | | GTGTACCTCCAAGGACCCATCTGGGCCAAGATCCCAGAGACAGGGGCGCA |
| | | | CTTTCACCCCTCTCCGGCCATGGGCGGATTCGGACTCAAACACCCACCGC |
| | | | CCATGATGCTCATCAAGAACACGCCTGTGCCCGGAAATATCACCAGCTTC |
| | | | TCGGACGTGCCCGTCAGCAGCTTCATCACCCAGTACAGCACCGGGCAGGT |
| | | | CACCGTGGAGATGGAGTGGGAGCTCAAGAAGGAAAACTCCAAGAGGTGGA |
| | | | ACCCAGAGATCCAGTACACAAACAACTACAACGACCCCCAGTTTGTGGAC |
| | | | TTTGCCCCGGACAGCACCGGGGAATACAGAACCACCAGACCTATCGGAAC |
| | | | CCGATACCTTACCCGACCCCTTTAA |
| 99 | 25 | MAAP_aa | MRETTPTSSTTTRTPSFRRSSPTTHPSGETSERQSFRPRKGFSNLLAWLK |
| | | | RVLRRPLPESG* |
| 100 | 25 | MAAP_nt | ATGCGGGAGACAACCCCTACCTCAAGTACAACCACGCGGACGCCGAGTTT |
| | | | CAGGAGAAGCTCGCCGACGACACATCCTTCGGGGGAAACCTCGGAAAGGC |
| | | | AGTCTTTCAGGCCAAGAAAAGGGTTCTCGAACCTTTTGGCCTGGTTGAAG |
| | | | AGGGTGCTAAGACGGCCCCTACCGGAAAGCGGATAG |
| 101 | 26 | VP1_aa | MSFVDHPPDWLEEVGEGLREFLGLEAGPPKPKPNEQHKDQARGLVLPGYN |
| | | | YLGPFNGLDRGEPVNRADEVAREHDISYNEQLEAGDNPYLKYNHADAEFQ |
| | | | EKLADDTSFGGNLGKAVFQAKKRVLEPFGLVEEGAKTAPTGKRIDDHFPK |
| | | | RKKARTEEDSKPSTSSDAEAGPSGSQQLQIPAQPASSLGADTMSAGGGGP |
| | | | LGDNNQGADGVGNASGDWHCDSTWMGDRVVTKSTRTWVLPSYNNHQYREI |
| | | | KSGSVDGSNANAYFGYSTPWGYFDFNRFHSHWSPRDWQRLINNYWGFRPR |
| | | | SLRVKIFNIQVKEVTVQDSTTTIANNLTSTVQVFTDDDYQLPYVVGNGTE |
| | | | GCLPAFPPQVFTLPQYGYATLNRDNTENPTERSSFFCLEYFPSKMLRTGN |
| | | | NFEFTYNFEEVPFHSSFAPSQNLFKLANPLVDQYLYRFVSTNNTGGVQFN |
| | | | KNLAGRYANTYKNWFPGPMGRTQGWNLGSGVNRASVSAFATTNRMELEGA |
| | | | SYQVPPQPNGMTNNLQGSNTYALENTMIFNSQPANPGTTATYLEGNMLIT |
| | | | SESETQPVNRVAYNVGGQMATNNQSSTTAPATGTYNLQEIVPGSVWMERD |
| | | | VYLQGPIWAKIPETGAHFHPSPAMGGFGLKHPPPMMLIKNTPVPGNITSF |
| | | | SDVPVSSFITQYSTGQVTVEMEWELKKENSKRWNPEIQYTNNYNDPQFVD |
| | | | FAPDSTGEYRTTRPIGTRYLTRPL* |
| 102 | 26 | VP1_nt | ATGTCTTTTGTTGATCACCCTCCAGATTGGTTGGAAGAAGTTGGTGAAGG |
| | | | TCTTCGCGAGTTTTTGGGCCTTGAAGCGGGCCCACCGAAACCAAAACCCA |
| | | | ATGAGCAGCATAAGGATCAAGCCCGTGGTCTTGTGCTGCCTGGTTATAAC |
| | | | TATCTCGGACCCTTCAACGGGCTCGATCGAGGAGAGCCTGTCAACAGGGC |
| | | | AGACGAGGTCGCGCGAGAGCACGACATCTCGTACAACGAGCAGCTTGAGG |
| | | | CGGGAGACAACCCCTACCTCAAGTACAACCACGCGGACGCCGAGTTTCAG |
| | | | GAGAAGCTCGCCGACGACACATCCTTCGGGGGAAACCTCGGAAAGGCAGT |
| | | | CTTTCAGGCCAAGAAAAGGGTTCTCGAACCTTTTGGCCTGGTTGAAGAGG |
| | | | GTGCTAAGACGGCCCCTACCGGAAAGCGGATAGACGACCACTTTCCAAAA |
| | | | AGAAAGAAGGCTCGGACCGAAGAGGACTCCAAGCCTTCCACCTCGTCAGA |
| | | | CGCCGAAGCTGGACCCAGCGGATCCCAGCAGCTGCAAATCCCAGCCCAAC |
| | | | CAGCCTCAAGTTTGGGAGCTGATACAATGTCTGCGGGAGGTGGCGGCCCA |
| | | | TTGGGCGACAATAACCAAGGTGCCGATGGAGTGGGCAATGCCTCGGGAGA |
| | | | TTGGCATTGCGATTCCACGTGGATGGGGGACAGAGTCGTCACCAAGTCCA |
| | | | CCCGAACCTGGGTGCTGCCCAGCTACAACAACCACCAGTACCGAGAGATC |
| | | | AAAAGCGGCTCCGTCGACGGAAGCAACGCCAACGCCTACTTTGGATACAG |
| | | | CACCCCCTGGGGGTACTTTGACTTTAACCGCTTCCACAGCCACTGGAGCC |
| | | | CCCGAGACTGGCAAAGACTCATCAACAACTACTGGGGCTTCAGACCCCGG |
| | | | TCCCTCAGAGTCAAAATCTTCAACATTCAAGTCAAAGAGGTCACGGTGCA |
| | | | GGACTCCACCACCACCATCGCCAACAACCTCACCTCCACCGTCCAAGTGT |
| | | | TTACGGACGACGACTACCAGCTGCCCTACGTCGTCGGCAACGGGACCGAG |
| | | | GGATGCCTGCCGGCCTTCCCTCCGCAGGTCTTTACGCTGCCGCAGTACGG |
| | | | TTACGCGACGCTGAACCGCGACAACACAGAAAATCCCACCGAGAGGAGCA |
| | | | GCTTCTTCTGCCTAGAGTACTTTCCCAGCAAGATGCTGAGAACGGGCAAC |
| | | | AACTTTGAGTTTACCTACAACTTTGAGGAGGTGCCCTTCCACTCCAGCTT |
| | | | CGCTCCCAGTCAGAACCTGTTCAAGCTGGCCAACCCGCTGGTGGACCAGT |
| | | | ACTTGTACCGCTTCGTGAGCACAAATAACACTGGCGGAGTCCAGTTCAAC |
| | | | AAGAACCTGGCCGGGAGATACGCCAACACCTACAAAAACTGGTTCCCGGG |
| | | | GCCCATGGGCCGAACCCAGGGCTGGAACCTGGGCTCCGGGGTCAACCGCG |
| | | | CCAGTGTCAGCGCCTTCGCCACGACCAATAGGATGGAGCTCGAGGGCGCG |
| | | | AGTTACCAGGTGCCCCCGCAGCCGAACGGCATGACCAACAACCTCCAGGG |
| | | | CAGCAACACCTATGCCCTGGAGAACACTATGATCTTCAACAGCCAGCCGG |
| | | | CGAACCCGGGCACCACCGCCACGTACCTCGAGGGCAACATGCTCATCACC |
| | | | AGCGAGAGCGAGACACAGCCGGTGAACCGCGTGGCGTACAACGTCGGCGG |
| | | | GCAGATGGCCACCAACAACCAGAGCTCCACCACTGCCCCCGCGACCGGCA |
| | | | CGTACAACCTCCAGGAAATCGTGCCCGGCAGCGTGTGGATGGAGAGGGAC |
| | | | GTGTACCTCCAAGGACCCATCTGGGCCAAGATCCCAGAGACAGGGGCGCA |
| | | | CTTTCACCCCTCTCCGGCCATGGGCGGATTCGGACTCAAACACCCACCGC |
| | | | CCATGATGCTCATCAAGAACACGCCTGTGCCCGGAAATATCACCAGCTTC |
| | | | TCGGACGTGCCCGTCAGCAGCTTCATCACCCAGTACAGCACCGGGCAGGT |
| | | | CACCGTGGAGATGGAGTGGGAGCTCAAGAAGGAAAACTCCAAGAGGTGGA |
| | | | ACCCAGAGATCCAGTACACAAACAACTACAACGACCCCCAGTTTGTGGAC |
| | | | TTTGCCCCGGACAGCACCGGGGAATACAGAACCACCAGACCTATCGGAAC |
| | | | CCGATACCTTACCCGACCCCTTTAA |
| 103 | 26 | MAAP_aa | MSSIRIKPVVLCCLVITISDPSTGSIEESLSTGQTRSRESTTSRTTSSLR |
| | | | RETTPTSSTTTRTPSFRRSSPTTHPSGETSERQSFRPRKGFSNLLAWLKR |
| | | | VLRRPLPESG* |
| 104 | 26 | MAAP_nt | ATGAGCAGCATAAGGATCAAGCCCGTGGTCTTGTGCTGCCTGGTTATAAC |
| | | | TATCTCGGACCCTTCAACGGGCTCGATCGAGGAGAGCCTGTCAACAGGGC |
| | | | AGACGAGGTCGCGCGAGAGCACGACATCTCGTACAACGAGCAGCTTGAGG |
| | | | CGGGAGACAACCCCTACCTCAAGTACAACCACGCGGACGCCGAGTTTCAG |
| | | | GAGAAGCTCGCCGACGACACATCCTTCGGGGGAAACCTCGGAAAGGCAGT |
| | | | CTTTCAGGCCAAGAAAAGGGTTCTCGAACCTTTTGGCCTGGTTGAAGAGG |
| | | | GTGCTAAGACGGCCCCTACCGGAAAGCGGATAG |
| 105 | 27 | VP1_aa | MSFVDHPPDWLEEVGEGLREFLGLEAGPPKPKPNQQHQDQARGLVLPGYN |
| | | | YLGPGNGLDRGEPVNEADAVALEHDISYNEQLDAGDNPYLKYNHADAEFQ |
| | | | EKLADDTSFGGNLGKAVFQAKKRVLEPFGLVEEGAKTAPTGKRIDDHFPK |
| | | | RKKARTEEDSKPSTSSDAEAGPSGSQQLQIPAQPASSLGADTMSAGGGGP |
| | | | LGDNNQGADGVGNASGDWHCDSTWMGDRVVTKSTRTWVLPSYNNHQYREI |
| | | | KSGSVDGSNANAYFGYSTPWGYFDFNRFHSHWSPRDWQRLINNYWGFRPR |
| | | | SLRVKIFNIQVKEVTVQDSTTTIANNLTSTVQVFTDDDYQLPYVVGNGTE |
| | | | GCLPAFPPQVFTLPQYGYATLNRDNTENPTERSSFFCLEYFPSKMLRTGN |
| | | | NFEFTYNFEEVPFHSSFAPSQNLFKLANPLVDQYLYRFVSTNNTGGVQFN |
| | | | KNLAGRYANTYKNWFPGPMGRTQGWNLGSGVNRASVSAFATTNRMELEGA |
| | | | SYQVPPQPNGMTNNLQGSNTYALENTMIFNSQPANPGTTATYLEGNMLIT |
| | | | SESETQPVNRVAYNVGGQMATNNQSSTTAPATGTYNLQEIVPGSVWMERD |
| | | | VYLQGPIWAKIPETGAHFHPSPAMGGFGLKHPPPMMLIKNTPVPGNITSF |
| | | | SDVPVSSFITQYSTGQVTVEMEWELKKENSKRWNPEIQYTNNYNDPQFVD |
| | | | FAPDSTGEYRTTRPIGTRYLTRPL* |
| 106 | 27 | VP1_nt | ATGTCTTTTGTTGATCACCCTCCAGATTGGTTGGAAGAAGTTGGTGAAGG |
| | | | TCTTCGCGAGTTTTTGGGCCTTGAAGCGGGCCCACCGAAACCAAAACCCA |
| | | | ATCAGCAGCATCAAGATCAAGCCCGTGGTCTTGTGCTGCCTGGTTATAAC |
| | | | TATCTCGGACCCGGAAACGGGCTCGATCGAGGAGAGCCTGTCAACGAAGC |
| | | | AGACGCGGTCGCGCTTGAGCACGACATCTCGTACAACGAGCAGCTTGATG |
| | | | CGGGAGACAACCCCTACCTCAAGTACAACCACGCGGACGCCGAGTTTCAG |
| | | | GAGAAGCTCGCCGACGACACATCCTTCGGGGGAAACCTCGGAAAGGCAGT |
| | | | CTTTCAGGCCAAGAAAAGGGTTCTCGAACCTTTTGGCCTGGTTGAAGAGG |
| | | | GTGCTAAGACGGCCCCTACCGGAAAGCGGATAGACGACCACTTTCCAAAA |
| | | | AGAAAGAAGGCTCGGACCGAAGAGGACTCCAAGCCTTCCACCTCGTCAGA |
| | | | CGCCGAAGCTGGACCCAGCGGATCCCAGCAGCTGCAAATCCCAGCCCAAC |
| | | | CAGCCTCAAGTTTGGGAGCTGATACAATGTCTGCGGGAGGTGGCGGCCCA |
| | | | TTGGGCGACAATAACCAAGGTGCCGATGGAGTGGGCAATGCCTCGGGAGA |
| | | | TTGGCATTGCGATTCCACGTGGATGGGGGACAGAGTCGTCACCAAGTCCA |
| | | | CCCGAACCTGGGTGCTGCCCAGCTACAACAACCACCAGTACCGAGAGATC |
| | | | AAAAGCGGCTCCGTCGACGGAAGCAACGCCAACGCCTACTTTGGATACAG |
| | | | CACCCCCTGGGGGTACTTTGACTTTAACCGCTTCCACAGCCACTGGAGCC |
| | | | CCCGAGACTGGCAAAGACTCATCAACAACTACTGGGGCTTCAGACCCCGG |
| | | | TCCCTCAGAGTCAAAATCTTCAACATTCAAGTCAAAGAGGTCACGGTGCA |
| | | | GGACTCCACCACCACCATCGCCAACAACCTCACCTCCACCGTCCAAGTGT |
| | | | TTACGGACGACGACTACCAGCTGCCCTACGTCGTCGGCAACGGGACCGAG |
| | | | GGATGCCTGCCGGCCTTCCCTCCGCAGGTCTTTACGCTGCCGCAGTACGG |
| | | | TTACGCGACGCTGAACCGCGACAACACAGAAAATCCCACCGAGAGGAGCA |
| | | | GCTTCTTCTGCCTAGAGTACTTTCCCAGCAAGATGCTGAGAACGGGCAAC |
| | | | AACTTTGAGTTTACCTACAACTTTGAGGAGGTGCCCTTCCACTCCAGCTT |
| | | | CGCTCCCAGTCAGAACCTGTTCAAGCTGGCCAACCCGCTGGTGGACCAGT |
| | | | ACTTGTACCGCTTCGTGAGCACAAATAACACTGGCGGAGTCCAGTTCAAC |
| | | | AAGAACCTGGCCGGGAGATACGCCAACACCTACAAAAACTGGTTCCCGGG |
| | | | GCCCATGGGCCGAACCCAGGGCTGGAACCTGGGCTCCGGGGTCAACCGCG |
| | | | CCAGTGTCAGCGCCTTCGCCACGACCAATAGGATGGAGCTCGAGGGCGCG |
| | | | AGTTACCAGGTGCCCCCGCAGCCGAACGGCATGACCAACAACCTCCAGGG |
| | | | CAGCAACACCTATGCCCTGGAGAACACTATGATCTTCAACAGCCAGCCGG |
| | | | CGAACCCGGGCACCACCGCCACGTACCTCGAGGGCAACATGCTCATCACC |
| | | | AGCGAGAGCGAGACACAGCCGGTGAACCGCGTGGCGTACAACGTCGGCGG |
| | | | GCAGATGGCCACCAACAACCAGAGCTCCACCACTGCCCCCGCGACCGGCA |
| | | | CGTACAACCTCCAGGAAATCGTGCCCGGCAGCGTGTGGATGGAGAGGGAC |
| | | | GTGTACCTCCAAGGACCCATCTGGGCCAAGATCCCAGAGACAGGGGCGCA |
| | | | CTTTCACCCCTCTCCGGCCATGGGCGGATTCGGACTCAAACACCCACCGC |
| | | | CCATGATGCTCATCAAGAACACGCCTGTGCCCGGAAATATCACCAGCTTC |
| | | | TCGGACGTGCCCGTCAGCAGCTTCATCACCCAGTACAGCACCGGGCAGGT |
| | | | CACCGTGGAGATGGAGTGGGAGCTCAAGAAGGAAAACTCCAAGAGGTGGA |
| | | | ACCCAGAGATCCAGTACACAAACAACTACAACGACCCCCAGTTTGTGGAC |
| | | | TTTGCCCCGGACAGCACCGGGGAATACAGAACCACCAGACCTATCGGAAC |
| | | | CCGATACCTTACCCGACCCCTTTAA |
| 107 | 27 | MAAP_aa | MRETTPTSSTTTRTPSFRRSSPTTHPSGETSERQSFRPRKGFSNLLAWLK |
| | | | RVLRRPLPESG* |
| 108 | 27 | MAAP_nt | ATGCGGGAGACAACCCCTACCTCAAGTACAACCACGCGGACGCCGAGTTT |
| | | | CAGGAGAAGCTCGCCGACGACACATCCTTCGGGGGAAACCTCGGAAAGGC |
| | | | AGTCTTTCAGGCCAAGAAAAGGGTTCTCGAACCTTTTGGCCTGGTTGAAG |
| | | | AGGGTGCTAAGACGGCCCCTACCGGAAAGCGGATAG |
| 109 | 28 | VP1_aa | MSFVDHPPDWLEEVGEGLREFLGLEAGPPKPKPNQQHQDNARGLVLPGYK |
| | | | YLGPGNGLDRGEPVNAADEVAREHDISYNEQLEAGDNPYLKYNHADAEFQ |
| | | | EKLADDTSFGGNLGKAVFQAKKRVLEPFGLVEEGAKTAPTGKRIDDHFPK |
| | | | RKKARTEEDSKPSTSSDAEAGPSGSQQLQIPAQPASSLGADTMSAGGGGP |
| | | | LGDNNQGADGVGNASGDWHCDSTWMGDRVVTKSTRTWVLPSYNNHQYREI |
| | | | KSGSVDGSNANAYFGYSTPWGYFDFNRFHSHWSPRDWQRLINNYWGFRPR |
| | | | SLRVKIFNIQVKEVTVQDSTTTIANNLTSTVQVFTDDDYQLPYVVGNGTE |
| | | | GCLPAFPPQVFTLPQYGYATLNRDNTENPTERSSFFCLEYFPSKMLRTGN |
| | | | NFEFTYNFEEVPFHSSFAPSQNLFKLANPLVDQYLYRFVSTNNTGGVQFN |
| | | | KNLAGRYANTYKNWFPGPMGRTQGWNLGSGVNRASVSAFATTNRMELEGA |
| | | | SYQVPPQPNGMTNNLQGSNTYALENTMIFNSQPANPGTTATYLEGNMLIT |
| | | | SESETQPVNRVAYNVGGQMATNNQSSTTAPATGTYNLQEIVPGSVWMERD |
| | | | VYLQGPIWAKIPETGAHFHPSPAMGGFGLKHPPPMMLIKNTPVPGNITSF |
| | | | SDVPVSSFITQYSTGQVTVEMEWELKKENSKRWNPEIQYTNNYNDPQFVD |
| | | | FAPDSTGEYRTTRPIGTRYLTRPL* |
| 110 | 28 | VP1_nt | ATGTCTTTTGTTGATCACCCTCCAGATTGGTTGGAAGAAGTTGGTGAAGG |
| | | | TCTTCGCGAGTTTTTGGGCCTTGAAGCGGGCCCACCGAAACCAAAACCCA |
| | | | ATCAGCAGCATCAAGATAATGCCCGTGGTCTTGTGCTGCCTGGTTATAAG |
| | | | TATCTCGGACCCGGAAACGGGCTCGATCGAGGAGAGCCTGTCAACGCTGC |
| | | | AGACGAGGTCGCGCGAGAGCACGACATCTCGTACAACGAGCAGCTTGAGG |
| | | | CGGGAGACAACCCCTACCTCAAGTACAACCACGCGGACGCCGAGTTTCAG |
| | | | GAGAAGCTCGCCGACGACACATCCTTCGGGGGAAACCTCGGAAAGGCAGT |
| | | | CTTTCAGGCCAAGAAAAGGGTTCTCGAACCTTTTGGCCTGGTTGAAGAGG |
| | | | GTGCTAAGACGGCCCCTACCGGAAAGCGGATAGACGACCACTTTCCAAAA |
| | | | AGAAAGAAGGCTCGGACCGAAGAGGACTCCAAGCCTTCCACCTCGTCAGA |
| | | | CGCCGAAGCTGGACCCAGCGGATCCCAGCAGCTGCAAATCCCAGCCCAAC |
| | | | CAGCCTCAAGTTTGGGAGCTGATACAATGTCTGCGGGAGGTGGCGGCCCA |
| | | | TTGGGCGACAATAACCAAGGTGCCGATGGAGTGGGCAATGCCTCGGGAGA |
| | | | TTGGCATTGCGATTCCACGTGGATGGGGGACAGAGTCGTCACCAAGTCCA |
| | | | CCCGAACCTGGGTGCTGCCCAGCTACAACAACCACCAGTACCGAGAGATC |
| | | | AAAAGCGGCTCCGTCGACGGAAGCAACGCCAACGCCTACTTTGGATACAG |
| | | | CACCCCCTGGGGGTACTTTGACTTTAACCGCTTCCACAGCCACTGGAGCC |
| | | | CCCGAGACTGGCAAAGACTCATCAACAACTACTGGGGCTTCAGACCCCGG |
| | | | TCCCTCAGAGTCAAAATCTTCAACATTCAAGTCAAAGAGGTCACGGTGCA |
| | | | GGACTCCACCACCACCATCGCCAACAACCTCACCTCCACCGTCCAAGTGT |
| | | | TTACGGACGACGACTACCAGCTGCCCTACGTCGTCGGCAACGGGACCGAG |
| | | | GGATGCCTGCCGGCCTTCCCTCCGCAGGTCTTTACGCTGCCGCAGTACGG |
| | | | TTACGCGACGCTGAACCGCGACAACACAGAAAATCCCACCGAGAGGAGCA |
| | | | GCTTCTTCTGCCTAGAGTACTTTCCCAGCAAGATGCTGAGAACGGGCAAC |
| | | | AACTTTGAGTTTACCTACAACTTTGAGGAGGTGCCCTTCCACTCCAGCTT |
| | | | CGCTCCCAGTCAGAACCTGTTCAAGCTGGCCAACCCGCTGGTGGACCAGT |
| | | | ACTTGTACCGCTTCGTGAGCACAAATAACACTGGCGGAGTCCAGTTCAAC |
| | | | AAGAACCTGGCCGGGAGATACGCCAACACCTACAAAAACTGGTTCCCGGG |
| | | | GCCCATGGGCCGAACCCAGGGCTGGAACCTGGGCTCCGGGGTCAACCGCG |
| | | | CCAGTGTCAGCGCCTTCGCCACGACCAATAGGATGGAGCTCGAGGGCGCG |
| | | | AGTTACCAGGTGCCCCCGCAGCCGAACGGCATGACCAACAACCTCCAGGG |
| | | | CAGCAACACCTATGCCCTGGAGAACACTATGATCTTCAACAGCCAGCCGG |
| | | | CGAACCCGGGCACCACCGCCACGTACCTCGAGGGCAACATGCTCATCACC |
| | | | AGCGAGAGCGAGACACAGCCGGTGAACCGCGTGGCGTACAACGTCGGCGG |
| | | | GCAGATGGCCACCAACAACCAGAGCTCCACCACTGCCCCCGCGACCGGCA |
| | | | CGTACAACCTCCAGGAAATCGTGCCCGGCAGCGTGTGGATGGAGAGGGAC |
| | | | GTGTACCTCCAAGGACCCATCTGGGCCAAGATCCCAGAGACAGGGGCGCA |
| | | | CTTTCACCCCTCTCCGGCCATGGGCGGATTCGGACTCAAACACCCACCGC |
| | | | CCATGATGCTCATCAAGAACACGCCTGTGCCCGGAAATATCACCAGCTTC |
| | | | TCGGACGTGCCCGTCAGCAGCTTCATCACCCAGTACAGCACCGGGCAGGT |
| | | | CACCGTGGAGATGGAGTGGGAGCTCAAGAAGGAAAACTCCAAGAGGTGGA |
| | | | ACCCAGAGATCCAGTACACAAACAACTACAACGACCCCCAGTTTGTGGAC |
| | | | TTTGCCCCGGACAGCACCGGGGAATACAGAACCACCAGACCTATCGGAAC |
| | | | CCGATACCTTACCCGACCCCTTTAA |
| 111 | 28 | MAAP_aa | MPVVLCCLVISISDPETGSIEESLSTLQTRSRESTTSRTTSSLRRETTPT |
| | | | SSTTTRTPSFRRSSPTTHPSGETSERQSFRPRKGFSNLLAWLKRVLRRPL |
| | | | PESG* |
| 112 | 28 | MAAP_nt | ATGCCCGTGGTCTTGTGCTGCCTGGTTATAAGTATCTCGGACCCGGAAAC |
| | | | GGGCTCGATCGAGGAGAGCCTGTCAACGCTGCAGACGAGGTCGCGCGAGA |
| | | | GCACGACATCTCGTACAACGAGCAGCTTGAGGCGGGAGACAACCCCTACC |
| | | | TCAAGTACAACCACGCGGACGCCGAGTTTCAGGAGAAGCTCGCCGACGAC |
| | | | ACATCCTTCGGGGGAAACCTCGGAAAGGCAGTCTTTCAGGCCAAGAAAAG |
| | | | GGTTCTCGAACCTTTTGGCCTGGTTGAAGAGGGTGCTAAGACGGCCCCTA |
| | | | CCGGAAAGCGGATAG |
| 113 | 29 | VP1_aa | MSFVDHPPDWLEEVGEGLREFLGLEAGPPKPKPNQQHQDQARGLVLPGYN |
| | | | YLGPGNGLDRGEPVNRADEVAREHDISYYEQLEAGDNPYLKYNHADAEFQ |
| | | | EKLADDTSFGGNLGKAVFQAKKRVLEPFGLVEEGAKTAPTGKRIDDHFPK |
| | | | RKKARTEEDSKPSTSSDAEAGPSGSQQLQIPAQPASSLGADTMSAGGGGP |
| | | | LGDNNQGADGVGNASGDWHCDSTWMGDRVVTKSTRTWVLPSYNNHQYREI |
| | | | KSGSVDGSNANAYFGYSTPWGYFDFNRFHSHWSPRDWQRLINNYWGFRPR |
| | | | SLRVKIFNIQVKEVTVQDSTTTIANNLTSTVQVFTDDDYQLPYVVGNGTE |
| | | | GCLPAFPPQVFTLPQYGYATLNRDNTENPTERSSFFCLEYFPSKMLRTGN |
| | | | NFEFTYNFEEVPFHSSFAPSQNLFKLANPLVDQYLYRFVSTNNTGGVQFN |
| | | | KNLAGRYANTYKNWFPGPMGRTQGWNLGSGVNRASVSAFATTNRMELEGA |
| | | | SYQVPPQPNGMTNNLQGSNTYALENTMIFNSQPANPGTTATYLEGNMLIT |
| | | | SESETQPVNRVAYNVGGQMATNNQSSTTAPATGTYNLQEIVPGSVWMERD |
| | | | VYLQGPIWAKIPETGAHFHPSPAMGGFGLKHPPPMMLIKNTPVPGNITSF |
| | | | SDVPVSSFITQYSTGQVTVEMEWELKKENSKRWNPEIQYTNNYNDPQFVD |
| | | | FAPDSTGEYRTTRPIGTRYLTRPL* |
| 114 | 29 | VP1_nt | ATGTCTTTTGTTGATCACCCTCCAGATTGGTTGGAAGAAGTTGGTGAAGG |
| | | | TCTTCGCGAGTTTTTGGGCCTTGAAGCGGGCCCACCGAAACCAAAACCCA |
| | | | ATCAGCAGCATCAAGATCAAGCCCGTGGTCTTGTGCTGCCTGGTTATAAC |
| | | | TATCTCGGACCCGGAAACGGGCTCGATCGAGGAGAGCCTGTCAACAGGGC |
| | | | AGACGAGGTCGCGCGAGAGCACGACATCTCGTACTATGAGCAGCTTGAGG |
| | | | CGGGAGACAACCCCTACCTCAAGTACAACCACGCGGACGCCGAGTTTCAG |
| | | | GAGAAGCTCGCCGACGACACATCCTTCGGGGGAAACCTCGGAAAGGCAGT |
| | | | CTTTCAGGCCAAGAAAAGGGTTCTCGAACCTTTTGGCCTGGTTGAAGAGG |
| | | | GTGCTAAGACGGCCCCTACCGGAAAGCGGATAGACGACCACTTTCCAAAA |
| | | | AGAAAGAAGGCTCGGACCGAAGAGGACTCCAAGCCTTCCACCTCGTCAGA |
| | | | CGCCGAAGCTGGACCCAGCGGATCCCAGCAGCTGCAAATCCCAGCCCAAC |
| | | | CAGCCTCAAGTTTGGGAGCTGATACAATGTCTGCGGGAGGTGGCGGCCCA |
| | | | TTGGGCGACAATAACCAAGGTGCCGATGGAGTGGGCAATGCCTCGGGAGA |
| | | | TTGGCATTGCGATTCCACGTGGATGGGGGACAGAGTCGTCACCAAGTCCA |
| | | | CCCGAACCTGGGTGCTGCCCAGCTACAACAACCACCAGTACCGAGAGATC |
| | | | AAAAGCGGCTCCGTCGACGGAAGCAACGCCAACGCCTACTTTGGATACAG |
| | | | CACCCCCTGGGGGTACTTTGACTTTAACCGCTTCCACAGCCACTGGAGCC |
| | | | CCCGAGACTGGCAAAGACTCATCAACAACTACTGGGGCTTCAGACCCCGG |
| | | | TCCCTCAGAGTCAAAATCTTCAACATTCAAGTCAAAGAGGTCACGGTGCA |
| | | | GGACTCCACCACCACCATCGCCAACAACCTCACCTCCACCGTCCAAGTGT |
| | | | TTACGGACGACGACTACCAGCTGCCCTACGTCGTCGGCAACGGGACCGAG |
| | | | GGATGCCTGCCGGCCTTCCCTCCGCAGGTCTTTACGCTGCCGCAGTACGG |
| | | | TTACGCGACGCTGAACCGCGACAACACAGAAAATCCCACCGAGAGGAGCA |
| | | | GCTTCTTCTGCCTAGAGTACTTTCCCAGCAAGATGCTGAGAACGGGCAAC |
| | | | AACTTTGAGTTTACCTACAACTTTGAGGAGGTGCCCTTCCACTCCAGCTT |
| | | | CGCTCCCAGTCAGAACCTGTTCAAGCTGGCCAACCCGCTGGTGGACCAGT |
| | | | ACTTGTACCGCTTCGTGAGCACAAATAACACTGGCGGAGTCCAGTTCAAC |
| | | | AAGAACCTGGCCGGGAGATACGCCAACACCTACAAAAACTGGTTCCCGGG |
| | | | GCCCATGGGCCGAACCCAGGGCTGGAACCTGGGCTCCGGGGTCAACCGCG |
| | | | CCAGTGTCAGCGCCTTCGCCACGACCAATAGGATGGAGCTCGAGGGCGCG |
| | | | AGTTACCAGGTGCCCCCGCAGCCGAACGGCATGACCAACAACCTCCAGGG |
| | | | CAGCAACACCTATGCCCTGGAGAACACTATGATCTTCAACAGCCAGCCGG |
| | | | CGAACCCGGGCACCACCGCCACGTACCTCGAGGGCAACATGCTCATCACC |
| | | | AGCGAGAGCGAGACACAGCCGGTGAACCGCGTGGCGTACAACGTCGGCGG |
| | | | GCAGATGGCCACCAACAACCAGAGCTCCACCACTGCCCCCGCGACCGGCA |
| | | | CGTACAACCTCCAGGAAATCGTGCCCGGCAGCGTGTGGATGGAGAGGGAC |
| | | | GTGTACCTCCAAGGACCCATCTGGGCCAAGATCCCAGAGACAGGGGCGCA |
| | | | CTTTCACCCCTCTCCGGCCATGGGCGGATTCGGACTCAAACACCCACCGC |
| | | | CCATGATGCTCATCAAGAACACGCCTGTGCCCGGAAATATCACCAGCTTC |
| | | | TCGGACGTGCCCGTCAGCAGCTTCATCACCCAGTACAGCACCGGGCAGGT |
| | | | CACCGTGGAGATGGAGTGGGAGCTCAAGAAGGAAAACTCCAAGAGGTGGA |
| | | | ACCCAGAGATCCAGTACACAAACAACTACAACGACCCCCAGTTTGTGGAC |
| | | | TTTGCCCCGGACAGCACCGGGGAATACAGAACCACCAGACCTATCGGAAC |
| | | | CCGATACCTTACCCGACCCCTTTAA |
| 115 | 29 | MAAP_aa | MSSLRRETTPTSSTTTRTPSFRRSSPTTHPSGETSERQSFRPRKGFSNLL |
| | | | AWLKRVLRRPLPESG* |
| 116 | 29 | MAAP_nt | ATGAGCAGCTTGAGGCGGGAGACAACCCCTACCTCAAGTACAACCACGCG |
| | | | GACGCCGAGTTTCAGGAGAAGCTCGCCGACGACACATCCTTCGGGGGAAA |
| | | | CCTCGGAAAGGCAGTCTTTCAGGCCAAGAAAAGGGTTCTCGAACCTTTTG |
| | | | GCCTGGTTGAAGAGGGTGCTAAGACGGCCCCTACCGGAAAGCGGATAG |
| 117 | 30 | VP1_aa | MSFVDHPPDWLEEVGEGLREFLGLEAGPPKPKPNQQHQDQARGLVLPGYN |
| | | | YLGPGNGLDAGEPVNRADEVAREHDISYNEQLEAGDNPYLKYNHADAEFQ |
| | | | EKLADDTSFGGNLGKAVFQAKKRVLEPFGLVEEGAKTAPTGKRIDDHFPK |
| | | | RKKARTEEDSKPSTSSDAEAGPSGSQQLQIPAQPASSLGADTMSAGGGGP |
| | | | LGDNNQGADGVGNASGDWHCDSTWMGDRVVTKSTRTWVLPSYNNHQYREI |
| | | | KSGSVDGSNANAYFGYSTPWGYFDFNRFHSHWSPRDWQRLINNYWGFRPR |
| | | | SLRVKIFNIQVKEVTVQDSTTTIANNLTSTVQVFTDDDYQLPYVVGNGTE |
| | | | GCLPAFPPQVFTLPQYGYATLNRDNTENPTERSSFFCLEYFPSKMLRTGN |
| | | | NFEFTYNFEEVPFHSSFAPSQNLFKLANPLVDQYLYRFVSTNNTGGVQFN |
| | | | KNLAGRYANTYKNWFPGPMGRTQGWNLGSGVNRASVSAFATTNRMELEGA |
| | | | SYQVPPQPNGMTNNLQGSNTYALENTMIFNSQPANPGTTATYLEGNMLIT |
| | | | SESETQPVNRVAYNVGGQMATNNQSSTTAPATGTYNLQEIVPGSVWMERD |
| | | | VYLQGPIWAKIPETGAHFHPSPAMGGFGLKHPPPMMLIKNTPVPGNITSF |
| | | | SDVPVSSFITQYSTGQVTVEMEWELKKENSKRWNPEIQYTNNYNDPQFVD |
| | | | FAPDSTGEYRTTRPIGTRYLTRPL* |
| 118 | 30 | VP1_nt | ATGTCTTTTGTTGATCACCCTCCAGATTGGTTGGAAGAAGTTGGTGAAGG |
| | | | TCTTCGCGAGTTTTTGGGCCTTGAAGCGGGCCCACCGAAACCAAAACCCA |
| | | | ATCAGCAGCATCAAGATCAAGCCCGTGGTCTTGTGCTGCCTGGTTATAAC |
| | | | TATCTCGGACCCGGAAACGGGCTCGATGCCGGAGAGCCTGTCAACAGGGC |
| | | | AGACGAGGTCGCGCGAGAGCACGACATCTCGTACAACGAGCAGCTTGAGG |
| | | | CGGGAGACAACCCCTACCTCAAGTACAACCACGCGGACGCCGAGTTTCAG |
| | | | GAGAAGCTCGCCGACGACACATCCTTCGGGGGAAACCTCGGAAAGGCAGT |
| | | | CTTTCAGGCCAAGAAAAGGGTTCTCGAACCTTTTGGCCTGGTTGAAGAGG |
| | | | GTGCTAAGACGGCCCCTACCGGAAAGCGGATAGACGACCACTTTCCAAAA |
| | | | AGAAAGAAGGCTCGGACCGAAGAGGACTCCAAGCCTTCCACCTCGTCAGA |
| | | | CGCCGAAGCTGGACCCAGCGGATCCCAGCAGCTGCAAATCCCAGCCCAAC |
| | | | CAGCCTCAAGTTTGGGAGCTGATACAATGTCTGCGGGAGGTGGCGGCCCA |
| | | | TTGGGCGACAATAACCAAGGTGCCGATGGAGTGGGCAATGCCTCGGGAGA |
| | | | TTGGCATTGCGATTCCACGTGGATGGGGGACAGAGTCGTCACCAAGTCCA |
| | | | CCCGAACCTGGGTGCTGCCCAGCTACAACAACCACCAGTACCGAGAGATC |
| | | | AAAAGCGGCTCCGTCGACGGAAGCAACGCCAACGCCTACTTTGGATACAG |
| | | | CACCCCCTGGGGGTACTTTGACTTTAACCGCTTCCACAGCCACTGGAGCC |
| | | | CCCGAGACTGGCAAAGACTCATCAACAACTACTGGGGCTTCAGACCCCGG |
| | | | TCCCTCAGAGTCAAAATCTTCAACATTCAAGTCAAAGAGGTCACGGTGCA |
| | | | GGACTCCACCACCACCATCGCCAACAACCTCACCTCCACCGTCCAAGTGT |
| | | | TTACGGACGACGACTACCAGCTGCCCTACGTCGTCGGCAACGGGACCGAG |
| | | | GGATGCCTGCCGGCCTTCCCTCCGCAGGTCTTTACGCTGCCGCAGTACGG |
| | | | TTACGCGACGCTGAACCGCGACAACACAGAAAATCCCACCGAGAGGAGCA |
| | | | GCTTCTTCTGCCTAGAGTACTTTCCCAGCAAGATGCTGAGAACGGGCAAC |
| | | | AACTTTGAGTTTACCTACAACTTTGAGGAGGTGCCCTTCCACTCCAGCTT |
| | | | CGCTCCCAGTCAGAACCTGTTCAAGCTGGCCAACCCGCTGGTGGACCAGT |
| | | | ACTTGTACCGCTTCGTGAGCACAAATAACACTGGCGGAGTCCAGTTCAAC |
| | | | AAGAACCTGGCCGGGAGATACGCCAACACCTACAAAAACTGGTTCCCGGG |
| | | | GCCCATGGGCCGAACCCAGGGCTGGAACCTGGGCTCCGGGGTCAACCGCG |
| | | | CCAGTGTCAGCGCCTTCGCCACGACCAATAGGATGGAGCTCGAGGGCGCG |
| | | | AGTTACCAGGTGCCCCCGCAGCCGAACGGCATGACCAACAACCTCCAGGG |
| | | | CAGCAACACCTATGCCCTGGAGAACACTATGATCTTCAACAGCCAGCCGG |
| | | | CGAACCCGGGCACCACCGCCACGTACCTCGAGGGCAACATGCTCATCACC |
| | | | AGCGAGAGCGAGACACAGCCGGTGAACCGCGTGGCGTACAACGTCGGCGG |
| | | | GCAGATGGCCACCAACAACCAGAGCTCCACCACTGCCCCCGCGACCGGCA |
| | | | CGTACAACCTCCAGGAAATCGTGCCCGGCAGCGTGTGGATGGAGAGGGAC |
| | | | GTGTACCTCCAAGGACCCATCTGGGCCAAGATCCCAGAGACAGGGGCGCA |
| | | | CTTTCACCCCTCTCCGGCCATGGGCGGATTCGGACTCAAACACCCACCGC |
| | | | CCATGATGCTCATCAAGAACACGCCTGTGCCCGGAAATATCACCAGCTTC |
| | | | TCGGACGTGCCCGTCAGCAGCTTCATCACCCAGTACAGCACCGGGCAGGT |
| | | | CACCGTGGAGATGGAGTGGGAGCTCAAGAAGGAAAACTCCAAGAGGTGGA |
| | | | ACCCAGAGATCCAGTACACAAACAACTACAACGACCCCCAGTTTGTGGAC |
| | | | TTTGCCCCGGACAGCACCGGGGAATACAGAACCACCAGACCTATCGGAAC |
| | | | CCGATACCTTACCCGACCCCTTTAA |
| 119 | 30 | MAAP_aa | MPESLSTGQTRSRESTTSRTTSSLRRETTPTSSTTTRTPSFRRSSPTTHP |
| | | | SGETSERQSFRPRKGFSNLLAWLKRVLRRPLPESG* |
| 120 | 30 | MAAP_nt | ATGCCGGAGAGCCTGTCAACAGGGCAGACGAGGTCGCGCGAGAGCACGAC |
| | | | ATCTCGTACAACGAGCAGCTTGAGGCGGGAGACAACCCCTACCTCAAGTA |
| | | | CAACCACGCGGACGCCGAGTTTCAGGAGAAGCTCGCCGACGACACATCCT |
| | | | TCGGGGGAAACCTCGGAAAGGCAGTCTTTCAGGCCAAGAAAAGGGTTCTC |
| | | | GAACCTTTTGGCCTGGTTGAAGAGGGTGCTAAGACGGCCCCTACCGGAAA |
| | | | GCGGATAG |
| 121 | 31 | VP1_aa | MSFVDHPPDWLEEVGEGLREFLGLEAGPPKPKPNQQHQDQARGLVLPGYV |
| | | | YLGPGNGLDRGEPVNRADEVAREHDISYNEQLEAGDNPYLKYNHADAEFQ |
| | | | EKLADDTSFGGNLGKAVFQAKKRVLEPFGLVEEGAKTAPTGKRIDDHFPK |
| | | | RKKARTEEDSKPSTSSDAEAGPSGSQQLQIPAQPASSLGADTMSAGGGGP |
| | | | LGDNNQGADGVGNASGDWHCDSTWMGDRVVTKSTRTWVLPSYNNHQYREI |
| | | | KSGSVDGSNANAYFGYSTPWGYFDFNRFHSHWSPRDWQRLINNYWGFRPR |
| | | | SLRVKIFNIQVKEVTVQDSTTTIANNLTSTVQVFTDDDYQLPYVVGNGTE |
| | | | GCLPAFPPQVFTLPQYGYATLNRDNTENPTERSSFFCLEYFPSKMLRTGN |
| | | | NFEFTYNFEEVPFHSSFAPSQNLFKLANPLVDQYLYRFVSTNNTGGVQFN |
| | | | KNLAGRYANTYKNWFPGPMGRTQGWNLGSGVNRASVSAFATTNRMELEGA |
| | | | SYQVPPQPNGMTNNLQGSNTYALENTMIFNSQPANPGTTATYLEGNMLIT |
| | | | SESETQPVNRVAYNVGGQMATNNQSSTTAPATGTYNLQEIVPGSVWMERD |
| | | | VYLQGPIWAKIPETGAHFHPSPAMGGFGLKHPPPMMLIKNTPVPGNITSF |
| | | | SDVPVSSFITQYSTGQVTVEMEWELKKENSKRWNPEIQYTNNYNDPQFVD |
| | | | FAPDSTGEYRTTRPIGTRYLTRPL* |
| 122 | 31 | VP1_nt | ATGTCTTTTGTTGATCACCCTCCAGATTGGTTGGAAGAAGTTGGTGAAGG |
| | | | TCTTCGCGAGTTTTTGGGCCTTGAAGCGGGCCCACCGAAACCAAAACCCA |
| | | | ATCAGCAGCATCAAGATCAAGCCCGTGGTCTTGTGCTGCCTGGTTATGTT |
| | | | TATCTCGGACCCGGAAACGGGCTCGATCGAGGAGAGCCTGTCAACAGGGC |
| | | | AGACGAGGTCGCGCGAGAGCACGACATCTCGTACAACGAGCAGCTTGAGG |
| | | | CGGGAGACAACCCCTACCTCAAGTACAACCACGCGGACGCCGAGTTTCAG |
| | | | GAGAAGCTCGCCGACGACACATCCTTCGGGGGAAACCTCGGAAAGGCAGT |
| | | | CTTTCAGGCCAAGAAAAGGGTTCTCGAACCTTTTGGCCTGGTTGAAGAGG |
| | | | GTGCTAAGACGGCCCCTACCGGAAAGCGGATAGACGACCACTTTCCAAAA |
| | | | AGAAAGAAGGCTCGGACCGAAGAGGACTCCAAGCCTTCCACCTCGTCAGA |
| | | | CGCCGAAGCTGGACCCAGCGGATCCCAGCAGCTGCAAATCCCAGCCCAAC |
| | | | CAGCCTCAAGTTTGGGAGCTGATACAATGTCTGCGGGAGGTGGCGGCCCA |
| | | | TTGGGCGACAATAACCAAGGTGCCGATGGAGTGGGCAATGCCTCGGGAGA |
| | | | TTGGCATTGCGATTCCACGTGGATGGGGGACAGAGTCGTCACCAAGTCCA |
| | | | CCCGAACCTGGGTGCTGCCCAGCTACAACAACCACCAGTACCGAGAGATC |
| | | | AAAAGCGGCTCCGTCGACGGAAGCAACGCCAACGCCTACTTTGGATACAG |
| | | | CACCCCCTGGGGGTACTTTGACTTTAACCGCTTCCACAGCCACTGGAGCC |
| | | | CCCGAGACTGGCAAAGACTCATCAACAACTACTGGGGCTTCAGACCCCGG |
| | | | TCCCTCAGAGTCAAAATCTTCAACATTCAAGTCAAAGAGGTCACGGTGCA |
| | | | GGACTCCACCACCACCATCGCCAACAACCTCACCTCCACCGTCCAAGTGT |
| | | | TTACGGACGACGACTACCAGCTGCCCTACGTCGTCGGCAACGGGACCGAG |
| | | | GGATGCCTGCCGGCCTTCCCTCCGCAGGTCTTTACGCTGCCGCAGTACGG |
| | | | TTACGCGACGCTGAACCGCGACAACACAGAAAATCCCACCGAGAGGAGCA |
| | | | GCTTCTTCTGCCTAGAGTACTTTCCCAGCAAGATGCTGAGAACGGGCAAC |
| | | | AACTTTGAGTTTACCTACAACTTTGAGGAGGTGCCCTTCCACTCCAGCTT |
| | | | CGCTCCCAGTCAGAACCTGTTCAAGCTGGCCAACCCGCTGGTGGACCAGT |
| | | | ACTTGTACCGCTTCGTGAGCACAAATAACACTGGCGGAGTCCAGTTCAAC |
| | | | AAGAACCTGGCCGGGAGATACGCCAACACCTACAAAAACTGGTTCCCGGG |
| | | | GCCCATGGGCCGAACCCAGGGCTGGAACCTGGGCTCCGGGGTCAACCGCG |
| | | | CCAGTGTCAGCGCCTTCGCCACGACCAATAGGATGGAGCTCGAGGGCGCG |
| | | | AGTTACCAGGTGCCCCCGCAGCCGAACGGCATGACCAACAACCTCCAGGG |
| | | | CAGCAACACCTATGCCCTGGAGAACACTATGATCTTCAACAGCCAGCCGG |
| | | | CGAACCCGGGCACCACCGCCACGTACCTCGAGGGCAACATGCTCATCACC |
| | | | AGCGAGAGCGAGACACAGCCGGTGAACCGCGTGGCGTACAACGTCGGCGG |
| | | | GCAGATGGCCACCAACAACCAGAGCTCCACCACTGCCCCCGCGACCGGCA |
| | | | CGTACAACCTCCAGGAAATCGTGCCCGGCAGCGTGTGGATGGAGAGGGAC |
| | | | GTGTACCTCCAAGGACCCATCTGGGCCAAGATCCCAGAGACAGGGGCGCA |
| | | | CTTTCACCCCTCTCCGGCCATGGGCGGATTCGGACTCAAACACCCACCGC |
| | | | CCATGATGCTCATCAAGAACACGCCTGTGCCCGGAAATATCACCAGCTTC |
| | | | TCGGACGTGCCCGTCAGCAGCTTCATCACCCAGTACAGCACCGGGCAGGT |
| | | | CACCGTGGAGATGGAGTGGGAGCTCAAGAAGGAAAACTCCAAGAGGTGGA |
| | | | ACCCAGAGATCCAGTACACAAACAACTACAACGACCCCCAGTTTGTGGAC |
| | | | TTTGCCCCGGACAGCACCGGGGAATACAGAACCACCAGACCTATCGGAAC |
| | | | CCGATACCTTACCCGACCCCTTTAA |
| 123 | 31 | MAAP_aa | MFISDPETGSIEESLSTGQTRSRESTTSRTTSSLRRETTPTSSTTTRTPS |
| | | | FRRSSPTTHPSGETSERQSFRPRKGFSNLLAWLKRVLRRPLPESG* |
| 124 | 31 | MAAP_nt | ATGTTTATCTCGGACCCGGAAACGGGCTCGATCGAGGAGAGCCTGTCAAC |
| | | | AGGGCAGACGAGGTCGCGCGAGAGCACGACATCTCGTACAACGAGCAGCT |
| | | | TGAGGCGGGAGACAACCCCTACCTCAAGTACAACCACGCGGACGCCGAGT |
| | | | TTCAGGAGAAGCTCGCCGACGACACATCCTTCGGGGGAAACCTCGGAAAG |
| | | | GCAGTCTTTCAGGCCAAGAAAAGGGTTCTCGAACCTTTTGGCCTGGTTGA |
| | | | AGAGGGTGCTAAGACGGCCCCTACCGGAAAGCGGATAG |
| 125 | 32 | VP1_aa | MSFVDHPPDWLETLGEGLREFLKLEAGPPKPKPNERHQDQARGLVLPGYN |
| | | | YLGPGNGLDRGEPVNRADEVAREHDISYNEQLEAGDNPYLKYNHADAEFQ |
| | | | EKLADDTSFGGNLGKAVFQAKKRVLEPFGLVEEGAKTAPTGKRIDDHFPK |
| | | | RKKARTEEDSKPSTSSDAEAGPSGSQQLQIPAQPASSLGADTMSAGGGGP |
| | | | LGDNNQGADGVGNASGDWHCDSTWMGDRVVTKSTRTWVLPSYNNHQYREI |
| | | | KSGSVDGSNANAYFGYSTPWGYFDFNRFHSHWSPRDWQRLINNYWGFRPR |
| | | | SLRVKIFNIQVKEVTVQDSTTTIANNLTSTVQVFTDDDYQLPYVVGNGTE |
| | | | GCLPAFPPQVFTLPQYGYATLNRDNTENPTERSSFFCLEYFPSKMLRTGN |
| | | | NFEFTYNFEEVPFHSSFAPSQNLFKLANPLVDQYLYRFVSTNNTGGVQFN |
| | | | KNLAGRYANTYKNWFPGPMGRTQGWNLGSGVNRASVSAFATTNRMELEGA |
| | | | SYQVPPQPNGMTNNLQGSNTYALENTMIFNSQPANPGTTATYLEGNMLIT |
| | | | SESETQPVNRVAYNVGGQMATNNQSSTTAPATGTYNLQEIVPGSVWMERD |
| | | | VYLQGPIWAKIPETGAHFHPSPAMGGFGLKHPPPMMLIKNTPVPGNITSF |
| | | | SDVPVSSFITQYSTGQVTVEMEWELKKENSKRWNPEIQYTNNYNDPQFVD |
| | | | FAPDSTGEYRTTRPIGTRYLTRPL* |
| 126 | 32 | VP1_nt | ATGTCTTTTGTTGATCACCCTCCAGATTGGTTGGAAACCCTTGGTGAAGG |
| | | | CCTTCGCGAGTTTTTGAAACTTGAAGCGGGCCCACCGAAACCAAAACCCA |
| | | | ATGAACGGCATCAAGATCAAGCCCGTGGTCTTGTGCTGCCTGGTTATAAC |
| | | | TATCTCGGACCCGGAAACGGGCTCGATCGAGGAGAGCCTGTCAACAGGGC |
| | | | AGACGAGGTCGCGCGAGAGCACGACATCTCGTACAACGAGCAGCTTGAGG |
| | | | CGGGAGACAACCCCTACCTCAAGTACAACCACGCGGACGCCGAGTTTCAG |
| | | | GAGAAGCTCGCCGACGACACATCCTTCGGGGGAAACCTCGGAAAGGCAGT |
| | | | CTTTCAGGCCAAGAAAAGGGTTCTCGAACCTTTTGGCCTGGTTGAAGAGG |
| | | | GTGCTAAGACGGCCCCTACCGGAAAGCGGATAGACGACCACTTTCCAAAA |
| | | | AGAAAGAAGGCTCGGACCGAAGAGGACTCCAAGCCTTCCACCTCGTCAGA |
| | | | CGCCGAAGCTGGACCCAGCGGATCCCAGCAGCTGCAAATCCCAGCCCAAC |
| | | | CAGCCTCAAGTTTGGGAGCTGATACAATGTCTGCGGGAGGTGGCGGCCCA |
| | | | TTGGGCGACAATAACCAAGGTGCCGATGGAGTGGGCAATGCCTCGGGAGA |
| | | | TTGGCATTGCGATTCCACGTGGATGGGGGACAGAGTCGTCACCAAGTCCA |
| | | | CCCGAACCTGGGTGCTGCCCAGCTACAACAACCACCAGTACCGAGAGATC |
| | | | AAAAGCGGCTCCGTCGACGGAAGCAACGCCAACGCCTACTTTGGATACAG |
| | | | CACCCCCTGGGGGTACTTTGACTTTAACCGCTTCCACAGCCACTGGAGCC |
| | | | CCCGAGACTGGCAAAGACTCATCAACAACTACTGGGGCTTCAGACCCCGG |
| | | | TCCCTCAGAGTCAAAATCTTCAACATTCAAGTCAAAGAGGTCACGGTGCA |
| | | | GGACTCCACCACCACCATCGCCAACAACCTCACCTCCACCGTCCAAGTGT |
| | | | TTACGGACGACGACTACCAGCTGCCCTACGTCGTCGGCAACGGGACCGAG |
| | | | GGATGCCTGCCGGCCTTCCCTCCGCAGGTCTTTACGCTGCCGCAGTACGG |
| | | | TTACGCGACGCTGAACCGCGACAACACAGAAAATCCCACCGAGAGGAGCA |
| | | | GCTTCTTCTGCCTAGAGTACTTTCCCAGCAAGATGCTGAGAACGGGCAAC |
| | | | AACTTTGAGTTTACCTACAACTTTGAGGAGGTGCCCTTCCACTCCAGCTT |
| | | | CGCTCCCAGTCAGAACCTGTTCAAGCTGGCCAACCCGCTGGTGGACCAGT |
| | | | ACTTGTACCGCTTCGTGAGCACAAATAACACTGGCGGAGTCCAGTTCAAC |
| | | | AAGAACCTGGCCGGGAGATACGCCAACACCTACAAAAACTGGTTCCCGGG |
| | | | GCCCATGGGCCGAACCCAGGGCTGGAACCTGGGCTCCGGGGTCAACCGCG |
| | | | CCAGTGTCAGCGCCTTCGCCACGACCAATAGGATGGAGCTCGAGGGCGCG |
| | | | AGTTACCAGGTGCCCCCGCAGCCGAACGGCATGACCAACAACCTCCAGGG |
| | | | CAGCAACACCTATGCCCTGGAGAACACTATGATCTTCAACAGCCAGCCGG |
| | | | CGAACCCGGGCACCACCGCCACGTACCTCGAGGGCAACATGCTCATCACC |
| | | | AGCGAGAGCGAGACACAGCCGGTGAACCGCGTGGCGTACAACGTCGGCGG |
| | | | GCAGATGGCCACCAACAACCAGAGCTCCACCACTGCCCCCGCGACCGGCA |
| | | | CGTACAACCTCCAGGAAATCGTGCCCGGCAGCGTGTGGATGGAGAGGGAC |
| | | | GTGTACCTCCAAGGACCCATCTGGGCCAAGATCCCAGAGACAGGGGCGCA |
| | | | CTTTCACCCCTCTCCGGCCATGGGCGGATTCGGACTCAAACACCCACCGC |
| | | | CCATGATGCTCATCAAGAACACGCCTGTGCCCGGAAATATCACCAGCTTC |
| | | | TCGGACGTGCCCGTCAGCAGCTTCATCACCCAGTACAGCACCGGGCAGGT |
| | | | CACCGTGGAGATGGAGTGGGAGCTCAAGAAGGAAAACTCCAAGAGGTGGA |
| | | | ACCCAGAGATCCAGTACACAAACAACTACAACGACCCCCAGTTTGTGGAC |
| | | | TTTGCCCCGGACAGCACCGGGGAATACAGAACCACCAGACCTATCGGAAC |
| | | | CCGATACCTTACCCGACCCCTTTAA |
| 127 | 32 | MAAP_aa | MNGIKIKPVVLCCLVITISDPETGSIEESLSTGQTRSRESTTSRTTSSLR |
| | | | RETTPTSSTTTRTPSFRRSSPTTHPSGETSERQSFRPRKGFSNLLAWLKR |
| | | | VLRRPLPESG* |
| 128 | 32 | MAAP_nt | ATGAACGGCATCAAGATCAAGCCCGTGGTCTTGTGCTGCCTGGTTATAAC |
| | | | TATCTCGGACCCGGAAACGGGCTCGATCGAGGAGAGCCTGTCAACAGGGC |
| | | | AGACGAGGTCGCGCGAGAGCACGACATCTCGTACAACGAGCAGCTTGAGG |
| | | | CGGGAGACAACCCCTACCTCAAGTACAACCACGCGGACGCCGAGTTTCAG |
| | | | GAGAAGCTCGCCGACGACACATCCTTCGGGGGAAACCTCGGAAAGGCAGT |
| | | | CTTTCAGGCCAAGAAAAGGGTTCTCGAACCTTTTGGCCTGGTTGAAGAGG |
| | | | GTGCTAAGACGGCCCCTACCGGAAAGCGGATAG |
| 129 | 33 | VP1_aa | MSFVDHPPDWLEEVGEGLREFLGLEAGPPKPKPNQQHQDQARGLVLPGYN |
| | | | YLGPGNGLDRGEPVNEADEAAREHDISYNRQLDAGDNPYLKYNHADAEFQ |
| | | | EKLADDTSFGGNLGKAVFQAKKRVLEPFGLVEEGAKTAPTGKRIDDHFPK |
| | | | RKKARTEEDSKPSTSSDAEAGPSGSQQLQIPAQPASSLGADTMSAGGGGP |
| | | | LGDNNQGADGVGNASGDWHCDSTWMGDRVVTKSTRTWVLPSYNNHQYREI |
| | | | KSGSVDGSNANAYFGYSTPWGYFDFNRFHSHWSPRDWQRLINNYWGFRPR |
| | | | SLRVKIFNIQVKEVTVQDSTTTIANNLTSTVQVFTDDDYQLPYVVGNGTE |
| | | | GCLPAFPPQVFTLPQYGYATLNRDNTENPTERSSFFCLEYFPSKMLRTGN |
| | | | NFEFTYNFEEVPFHSSFAPSQNLFKLANPLVDQYLYRFVSTNNTGGVQFN |
| | | | KNLAGRYANTYKNWFPGPMGRTQGWNLGSGVNRASVSAFATTNRMELEGA |
| | | | SYQVPPQPNGMTNNLQGSNTYALENTMIFNSQPANPGTTATYLEGNMLIT |
| | | | SESETQPVNRVAYNVGGQMATNNQSSTTAPATGTYNLQEIVPGSVWMERD |
| | | | VYLQGPIWAKIPETGAHFHPSPAMGGFGLKHPPPMMLIKNTPVPGNITSF |
| | | | SDVPVSSFITQYSTGQVTVEMEWELKKENSKRWNPEIQYTNNYNDPQFVD |
| | | | FAPDSTGEYRTTRPIGTRYLTRPL* |
| 130 | 33 | VP1_nt | ATGTCTTTTGTTGATCACCCTCCAGATTGGTTGGAAGAAGTTGGTGAAGG |
| | | | TCTTCGCGAGTTTTTGGGCCTTGAAGCGGGCCCACCGAAACCAAAACCCA |
| | | | ATCAGCAGCATCAAGATCAAGCCCGTGGTCTTGTGCTGCCTGGTTATAAC |
| | | | TATCTCGGACCCGGAAACGGGCTCGATCGAGGAGAGCCTGTCAACGAGGC |
| | | | AGACGAGGCAGCGCGAGAGCACGACATCTCGTACAACCGCCAGCTTGATG |
| | | | CGGGAGACAACCCCTACCTCAAGTACAACCACGCGGACGCCGAGTTTCAG |
| | | | GAGAAGCTCGCCGACGACACATCCTTCGGGGGAAACCTCGGAAAGGCAGT |
| | | | CTTTCAGGCCAAGAAAAGGGTTCTCGAACCTTTTGGCCTGGTTGAAGAGG |
| | | | GTGCTAAGACGGCCCCTACCGGAAAGCGGATAGACGACCACTTTCCAAAA |
| | | | AGAAAGAAGGCTCGGACCGAAGAGGACTCCAAGCCTTCCACCTCGTCAGA |
| | | | CGCCGAAGCTGGACCCAGCGGATCCCAGCAGCTGCAAATCCCAGCCCAAC |
| | | | CAGCCTCAAGTTTGGGAGCTGATACAATGTCTGCGGGAGGTGGCGGCCCA |
| | | | TTGGGCGACAATAACCAAGGTGCCGATGGAGTGGGCAATGCCTCGGGAGA |
| | | | TTGGCATTGCGATTCCACGTGGATGGGGGACAGAGTCGTCACCAAGTCCA |
| | | | CCCGAACCTGGGTGCTGCCCAGCTACAACAACCACCAGTACCGAGAGATC |
| | | | AAAAGCGGCTCCGTCGACGGAAGCAACGCCAACGCCTACTTTGGATACAG |
| | | | CACCCCCTGGGGGTACTTTGACTTTAACCGCTTCCACAGCCACTGGAGCC |
| | | | CCCGAGACTGGCAAAGACTCATCAACAACTACTGGGGCTTCAGACCCCGG |
| | | | TCCCTCAGAGTCAAAATCTTCAACATTCAAGTCAAAGAGGTCACGGTGCA |
| | | | GGACTCCACCACCACCATCGCCAACAACCTCACCTCCACCGTCCAAGTGT |
| | | | TTACGGACGACGACTACCAGCTGCCCTACGTCGTCGGCAACGGGACCGAG |
| | | | GGATGCCTGCCGGCCTTCCCTCCGCAGGTCTTTACGCTGCCGCAGTACGG |
| | | | TTACGCGACGCTGAACCGCGACAACACAGAAAATCCCACCGAGAGGAGCA |
| | | | GCTTCTTCTGCCTAGAGTACTTTCCCAGCAAGATGCTGAGAACGGGCAAC |
| | | | AACTTTGAGTTTACCTACAACTTTGAGGAGGTGCCCTTCCACTCCAGCTT |
| | | | CGCTCCCAGTCAGAACCTGTTCAAGCTGGCCAACCCGCTGGTGGACCAGT |
| | | | ACTTGTACCGCTTCGTGAGCACAAATAACACTGGCGGAGTCCAGTTCAAC |
| | | | AAGAACCTGGCCGGGAGATACGCCAACACCTACAAAAACTGGTTCCCGGG |
| | | | GCCCATGGGCCGAACCCAGGGCTGGAACCTGGGCTCCGGGGTCAACCGCG |
| | | | CCAGTGTCAGCGCCTTCGCCACGACCAATAGGATGGAGCTCGAGGGCGCG |
| | | | AGTTACCAGGTGCCCCCGCAGCCGAACGGCATGACCAACAACCTCCAGGG |
| | | | CAGCAACACCTATGCCCTGGAGAACACTATGATCTTCAACAGCCAGCCGG |
| | | | CGAACCCGGGCACCACCGCCACGTACCTCGAGGGCAACATGCTCATCACC |
| | | | AGCGAGAGCGAGACACAGCCGGTGAACCGCGTGGCGTACAACGTCGGCGG |
| | | | GCAGATGGCCACCAACAACCAGAGCTCCACCACTGCCCCCGCGACCGGCA |
| | | | CGTACAACCTCCAGGAAATCGTGCCCGGCAGCGTGTGGATGGAGAGGGAC |
| | | | GTGTACCTCCAAGGACCCATCTGGGCCAAGATCCCAGAGACAGGGGCGCA |
| | | | CTTTCACCCCTCTCCGGCCATGGGCGGATTCGGACTCAAACACCCACCGC |
| | | | CCATGATGCTCATCAAGAACACGCCTGTGCCCGGAAATATCACCAGCTTC |
| | | | TCGGACGTGCCCGTCAGCAGCTTCATCACCCAGTACAGCACCGGGCAGGT |
| | | | CACCGTGGAGATGGAGTGGGAGCTCAAGAAGGAAAACTCCAAGAGGTGGA |
| | | | ACCCAGAGATCCAGTACACAAACAACTACAACGACCCCCAGTTTGTGGAC |
| | | | TTTGCCCCGGACAGCACCGGGGAATACAGAACCACCAGACCTATCGGAAC |
| | | | CCGATACCTTACCCGACCCCTTTAA |
| 131 | 33 | MAAP_aa | MRETTPTSSTTTRTPSFRRSSPTTHPSGETSERQSFRPRKGFSNLLAWLK |
| | | | RVLRRPLPESG* |
| 132 | 33 | MAAP_nt | ATGCGGGAGACAACCCCTACCTCAAGTACAACCACGCGGACGCCGAGTTT |
| | | | CAGGAGAAGCTCGCCGACGACACATCCTTCGGGGGAAACCTCGGAAAGGC |
| | | | AGTCTTTCAGGCCAAGAAAAGGGTTCTCGAACCTTTTGGCCTGGTTGAAG |
| | | | AGGGTGCTAAGACGGCCCCTACCGGAAAGCGGATAG |
| 133 | 34 | VP1_aa | MSFVDHPPDWLEEVGEGLREFLGLEAGPPKPKPNQQHQDQARGLVLPGYN |
| | | | YLGPGNGLDRGEPVNYADEVAREHDISYNEQLEAGDNPYLKYNHADAEFQ |
| | | | EKLADDTSFGGNLGKAVFQAKKRVLEPFGLVEEGAKTAPTGKRIDDHFPK |
| | | | RKKARTEEDSKPSTSSDAEAGPSGSQQLQIPAQPASSLGADTMSAGGGGP |
| | | | LGDNNQGADGVGNASGDWHCDSTWMGDRVVTKSTRTWVLPSYNNHQYREI |
| | | | KSGSVDGSNANAYFGYSTPWGYFDFNRFHSHWSPRDWQRLINNYWGFRPR |
| | | | SLRVKIFNIQVKEVTVQDSTTTIANNLTSTVQVFTDDDYQLPYVVGNGTE |
| | | | GCLPAFPPQVFTLPQYGYATLNRDNTENPTERSSFFCLEYFPSKMLRTGN |
| | | | NFEFTYNFEEVPFHSSFAPSQNLFKLANPLVDQYLYRFVSTNNTGGVQFN |
| | | | KNLAGRYANTYKNWFPGPMGRTQGWNLGSGVNRASVSAFATTNRMELEGA |
| | | | SYQVPPQPNGMTNNLQGSNTYALENTMIFNSQPANPGTTATYLEGNMLIT |
| | | | SESETQPVNRVAYNVGGQMATNNQSSTTAPATGTYNLQEIVPGSVWMERD |
| | | | VYLQGPIWAKIPETGAHFHPSPAMGGFGLKHPPPMMLIKNTPVPGNITSF |
| | | | SDVPVSSFITQYSTGQVTVEMEWELKKENSKRWNPEIQYTNNYNDPQFVD |
| | | | FAPDSTGEYRTTRPIGTRYLTRPL* |
| 134 | 34 | VP1_nt | ATGTCTTTTGTTGATCACCCTCCAGATTGGTTGGAAGAAGTTGGTGAAGG |
| | | | TCTTCGCGAGTTTTTGGGCCTTGAAGCGGGCCCACCGAAACCAAAACCCA |
| | | | ATCAGCAGCATCAAGATCAAGCCCGTGGTCTTGTGCTGCCTGGTTATAAC |
| | | | TATCTCGGACCCGGAAACGGGCTCGATCGAGGAGAGCCTGTCAACTATGC |
| | | | AGACGAGGTCGCGCGAGAGCACGACATCTCGTACAACGAGCAGCTTGAGG |
| | | | CGGGAGACAACCCCTACCTCAAGTACAACCACGCGGACGCCGAGTTTCAG |
| | | | GAGAAGCTCGCCGACGACACATCCTTCGGGGGAAACCTCGGAAAGGCAGT |
| | | | CTTTCAGGCCAAGAAAAGGGTTCTCGAACCTTTTGGCCTGGTTGAAGAGG |
| | | | GTGCTAAGACGGCCCCTACCGGAAAGCGGATAGACGACCACTTTCCAAAA |
| | | | AGAAAGAAGGCTCGGACCGAAGAGGACTCCAAGCCTTCCACCTCGTCAGA |
| | | | CGCCGAAGCTGGACCCAGCGGATCCCAGCAGCTGCAAATCCCAGCCCAAC |
| | | | CAGCCTCAAGTTTGGGAGCTGATACAATGTCTGCGGGAGGTGGCGGCCCA |
| | | | TTGGGCGACAATAACCAAGGTGCCGATGGAGTGGGCAATGCCTCGGGAGA |
| | | | TTGGCATTGCGATTCCACGTGGATGGGGGACAGAGTCGTCACCAAGTCCA |
| | | | CCCGAACCTGGGTGCTGCCCAGCTACAACAACCACCAGTACCGAGAGATC |
| | | | AAAAGCGGCTCCGTCGACGGAAGCAACGCCAACGCCTACTTTGGATACAG |
| | | | CACCCCCTGGGGGTACTTTGACTTTAACCGCTTCCACAGCCACTGGAGCC |
| | | | CCCGAGACTGGCAAAGACTCATCAACAACTACTGGGGCTTCAGACCCCGG |
| | | | TCCCTCAGAGTCAAAATCTTCAACATTCAAGTCAAAGAGGTCACGGTGCA |
| | | | GGACTCCACCACCACCATCGCCAACAACCTCACCTCCACCGTCCAAGTGT |
| | | | TTACGGACGACGACTACCAGCTGCCCTACGTCGTCGGCAACGGGACCGAG |
| | | | GGATGCCTGCCGGCCTTCCCTCCGCAGGTCTTTACGCTGCCGCAGTACGG |
| | | | TTACGCGACGCTGAACCGCGACAACACAGAAAATCCCACCGAGAGGAGCA |
| | | | GCTTCTTCTGCCTAGAGTACTTTCCCAGCAAGATGCTGAGAACGGGCAAC |
| | | | AACTTTGAGTTTACCTACAACTTTGAGGAGGTGCCCTTCCACTCCAGCTT |
| | | | CGCTCCCAGTCAGAACCTGTTCAAGCTGGCCAACCCGCTGGTGGACCAGT |
| | | | ACTTGTACCGCTTCGTGAGCACAAATAACACTGGCGGAGTCCAGTTCAAC |
| | | | AAGAACCTGGCCGGGAGATACGCCAACACCTACAAAAACTGGTTCCCGGG |
| | | | GCCCATGGGCCGAACCCAGGGCTGGAACCTGGGCTCCGGGGTCAACCGCG |
| | | | CCAGTGTCAGCGCCTTCGCCACGACCAATAGGATGGAGCTCGAGGGCGCG |
| | | | AGTTACCAGGTGCCCCCGCAGCCGAACGGCATGACCAACAACCTCCAGGG |
| | | | CAGCAACACCTATGCCCTGGAGAACACTATGATCTTCAACAGCCAGCCGG |
| | | | CGAACCCGGGCACCACCGCCACGTACCTCGAGGGCAACATGCTCATCACC |
| | | | AGCGAGAGCGAGACACAGCCGGTGAACCGCGTGGCGTACAACGTCGGCGG |
| | | | GCAGATGGCCACCAACAACCAGAGCTCCACCACTGCCCCCGCGACCGGCA |
| | | | CGTACAACCTCCAGGAAATCGTGCCCGGCAGCGTGTGGATGGAGAGGGAC |
| | | | GTGTACCTCCAAGGACCCATCTGGGCCAAGATCCCAGAGACAGGGGCGCA |
| | | | CTTTCACCCCTCTCCGGCCATGGGCGGATTCGGACTCAAACACCCACCGC |
| | | | CCATGATGCTCATCAAGAACACGCCTGTGCCCGGAAATATCACCAGCTTC |
| | | | TCGGACGTGCCCGTCAGCAGCTTCATCACCCAGTACAGCACCGGGCAGGT |
| | | | CACCGTGGAGATGGAGTGGGAGCTCAAGAAGGAAAACTCCAAGAGGTGGA |
| | | | ACCCAGAGATCCAGTACACAAACAACTACAACGACCCCCAGTTTGTGGAC |
| | | | TTTGCCCCGGACAGCACCGGGGAATACAGAACCACCAGACCTATCGGAAC |
| | | | CCGATACCTTACCCGACCCCTTTAA |
| 135 | 34 | MAAP_aa | MQTRSRESTTSRTTSSLRRETTPTSSTTTRTPSFRRSSPTTHPSGETSER |
| | | | QSFRPRKGFSNLLAWLKRVLRRPLPESG* |
| 136 | 34 | MAAP_nt | ATGCAGACGAGGTCGCGCGAGAGCACGACATCTCGTACAACGAGCAGCTT |
| | | | GAGGCGGGAGACAACCCCTACCTCAAGTACAACCACGCGGACGCCGAGTT |
| | | | TCAGGAGAAGCTCGCCGACGACACATCCTTCGGGGGAAACCTCGGAAAGG |
| | | | CAGTCTTTCAGGCCAAGAAAAGGGTTCTCGAACCTTTTGGCCTGGTTGAA |
| | | | GAGGGTGCTAAGACGGCCCCTACCGGAAAGCGGATAG |
| 137 | 35 | VP1_aa | MSFVDHPPDWLEEVGEGLREFLGLEAGPPKPKPNQQHQDQARGLVLPGYN |
| | | | YLGPGNGLDRGEPVNRADEAAREHDKAYNEQLDAGDNPYLKYNHADAEFQ |
| | | | EKLADDTSFGGNLGKAVFQAKKRVLEPFGLVEEGAKTAPTGKRIDDHFPK |
| | | | RKKARTEEDSKPSTSSDAEAGPSGSQQLQIPAQPASSLGADTMSAGGGGP |
| | | | LGDNNQGADGVGNASGDWHCDSTWMGDRVVTKSTRTWVLPSYNNHQYREI |
| | | | KSGSVDGSNANAYFGYSTPWGYFDFNRFHSHWSPRDWQRLINNYWGFRPR |
| | | | SLRVKIFNIQVKEVTVQDSTTTIANNLTSTVQVFTDDDYQLPYVVGNGTE |
| | | | GCLPAFPPQVFTLPQYGYATLNRDNTENPTERSSFFCLEYFPSKMLRTGN |
| | | | NFEFTYNFEEVPFHSSFAPSQNLFKLANPLVDQYLYRFVSTNNTGGVQFN |
| | | | KNLAGRYANTYKNWFPGPMGRTQGWNLGSGVNRASVSAFATTNRMELEGA |
| | | | SYQVPPQPNGMTNNLQGSNTYALENTMIFNSQPANPGTTATYLEGNMLIT |
| | | | SESETQPVNRVAYNVGGQMATNNQSSTTAPATGTYNLQEIVPGSVWMERD |
| | | | VYLQGPIWAKIPETGAHFHPSPAMGGFGLKHPPPMMLIKNTPVPGNITSF |
| | | | SDVPVSSFITQYSTGQVTVEMEWELKKENSKRWNPEIQYTNNYNDPQFVD |
| | | | FAPDSTGEYRTTRPIGTRYLTRPL* |
| 138 | 35 | VP1_nt | ATGTCTTTTGTTGATCACCCTCCAGATTGGTTGGAAGAAGTTGGTGAAGG |
| | | | TCTTCGCGAGTTTTTGGGCCTTGAAGCGGGCCCACCGAAACCAAAACCCA |
| | | | ATCAGCAGCATCAAGATCAAGCCCGTGGTCTTGTGCTGCCTGGTTATAAC |
| | | | TATCTCGGACCCGGAAACGGGCTCGATCGAGGAGAGCCTGTCAACAGGGC |
| | | | AGACGAGGCGGCGCGAGAGCACGACAAGGCTTACAACGAGCAGCTTGATG |
| | | | CGGGAGACAACCCCTACCTCAAGTACAACCACGCGGACGCCGAGTTTCAG |
| | | | GAGAAGCTCGCCGACGACACATCCTTCGGGGGAAACCTCGGAAAGGCAGT |
| | | | CTTTCAGGCCAAGAAAAGGGTTCTCGAACCTTTTGGCCTGGTTGAAGAGG |
| | | | GTGCTAAGACGGCCCCTACCGGAAAGCGGATAGACGACCACTTTCCAAAA |
| | | | AGAAAGAAGGCTCGGACCGAAGAGGACTCCAAGCCTTCCACCTCGTCAGA |
| | | | CGCCGAAGCTGGACCCAGCGGATCCCAGCAGCTGCAAATCCCAGCCCAAC |
| | | | CAGCCTCAAGTTTGGGAGCTGATACAATGTCTGCGGGAGGTGGCGGCCCA |
| | | | TTGGGCGACAATAACCAAGGTGCCGATGGAGTGGGCAATGCCTCGGGAGA |
| | | | TTGGCATTGCGATTCCACGTGGATGGGGGACAGAGTCGTCACCAAGTCCA |
| | | | CCCGAACCTGGGTGCTGCCCAGCTACAACAACCACCAGTACCGAGAGATC |
| | | | AAAAGCGGCTCCGTCGACGGAAGCAACGCCAACGCCTACTTTGGATACAG |
| | | | CACCCCCTGGGGGTACTTTGACTTTAACCGCTTCCACAGCCACTGGAGCC |
| | | | CCCGAGACTGGCAAAGACTCATCAACAACTACTGGGGCTTCAGACCCCGG |
| | | | TCCCTCAGAGTCAAAATCTTCAACATTCAAGTCAAAGAGGTCACGGTGCA |
| | | | GGACTCCACCACCACCATCGCCAACAACCTCACCTCCACCGTCCAAGTGT |
| | | | TTACGGACGACGACTACCAGCTGCCCTACGTCGTCGGCAACGGGACCGAG |
| | | | GGATGCCTGCCGGCCTTCCCTCCGCAGGTCTTTACGCTGCCGCAGTACGG |
| | | | TTACGCGACGCTGAACCGCGACAACACAGAAAATCCCACCGAGAGGAGCA |
| | | | GCTTCTTCTGCCTAGAGTACTTTCCCAGCAAGATGCTGAGAACGGGCAAC |
| | | | AACTTTGAGTTTACCTACAACTTTGAGGAGGTGCCCTTCCACTCCAGCTT |
| | | | CGCTCCCAGTCAGAACCTGTTCAAGCTGGCCAACCCGCTGGTGGACCAGT |
| | | | ACTTGTACCGCTTCGTGAGCACAAATAACACTGGCGGAGTCCAGTTCAAC |
| | | | AAGAACCTGGCCGGGAGATACGCCAACACCTACAAAAACTGGTTCCCGGG |
| | | | GCCCATGGGCCGAACCCAGGGCTGGAACCTGGGCTCCGGGGTCAACCGCG |
| | | | CCAGTGTCAGCGCCTTCGCCACGACCAATAGGATGGAGCTCGAGGGCGCG |
| | | | AGTTACCAGGTGCCCCCGCAGCCGAACGGCATGACCAACAACCTCCAGGG |
| | | | CAGCAACACCTATGCCCTGGAGAACACTATGATCTTCAACAGCCAGCCGG |
| | | | CGAACCCGGGCACCACCGCCACGTACCTCGAGGGCAACATGCTCATCACC |
| | | | AGCGAGAGCGAGACACAGCCGGTGAACCGCGTGGCGTACAACGTCGGCGG |
| | | | GCAGATGGCCACCAACAACCAGAGCTCCACCACTGCCCCCGCGACCGGCA |
| | | | CGTACAACCTCCAGGAAATCGTGCCCGGCAGCGTGTGGATGGAGAGGGAC |
| | | | GTGTACCTCCAAGGACCCATCTGGGCCAAGATCCCAGAGACAGGGGCGCA |
| | | | CTTTCACCCCTCTCCGGCCATGGGCGGATTCGGACTCAAACACCCACCGC |
| | | | CCATGATGCTCATCAAGAACACGCCTGTGCCCGGAAATATCACCAGCTTC |
| | | | TCGGACGTGCCCGTCAGCAGCTTCATCACCCAGTACAGCACCGGGCAGGT |
| | | | CACCGTGGAGATGGAGTGGGAGCTCAAGAAGGAAAACTCCAAGAGGTGGA |
| | | | ACCCAGAGATCCAGTACACAAACAACTACAACGACCCCCAGTTTGTGGAC |
| | | | TTTGCCCCGGACAGCACCGGGGAATACAGAACCACCAGACCTATCGGAAC |
| | | | CCGATACCTTACCCGACCCCTTTAA |
| 139 | 35 | MAAP_aa | MRETTPTSSTTTRTPSFRRSSPTTHPSGETSERQSFRPRKGFSNLLAWLK |
| | | | RVLRRPLPESG* |
| 140 | 35 | MAAP_nt | ATGCGGGAGACAACCCCTACCTCAAGTACAACCACGCGGACGCCGAGTTT |
| | | | CAGGAGAAGCTCGCCGACGACACATCCTTCGGGGGAAACCTCGGAAAGGC |
| | | | AGTCTTTCAGGCCAAGAAAAGGGTTCTCGAACCTTTTGGCCTGGTTGAAG |
| | | | AGGGTGCTAAGACGGCCCCTACCGGAAAGCGGATAG |
| 141 | 36 | VP1_aa | MSFVDHPPDWLEEVGEGLREFLGLEAGPPKPKPNGQQHQDQARGLVLPGY |
| | | | NYLGPGNGLDRGEPVNRADEVAREHDISYNEQLEAGDNPYLKYNHADAEF |
| | | | QEKLADDTSFGGNLGKAVFQAKKRVLEPFGLVEEGAKTAPTGKRIDDHFP |
| | | | KRKKARTEEDSKPSTSSDAEAGPSGSQQLQIPAQPASSLGADTMSAGGGG |
| | | | PLGDNNQGADGVGNASGDWHCDSTWMGDRVVTKSTRTWVLPSYNNHQYRE |
| | | | IKSGSVDGSNANAYFGYSTPWGYFDFNRFHSHWSPRDWQRLINNYWGFRP |
| | | | RSLRVKIFNIQVKEVTVQDSTTTIANNLTSTVQVFTDDDYQLPYVVGNGT |
| | | | EGCLPAFPPQVFTLPQYGYATLNRDNTENPTERSSFFCLEYFPSKMLRTG |
| | | | NNFEFTYNFEEVPFHSSFAPSQNLFKLANPLVDQYLYRFVSTNNTGGVQF |
| | | | NKNLAGRYANTYKNWFPGPMGRTQGWNLGSGVNRASVSAFATTNRMELEG |
| | | | ASYQVPPQPNGMTNNLQGSNTYALENTMIFNSQPANPGTTATYLEGNMLI |
| | | | TSESETQPVNRVAYNVGGQMATNNQSSTTAPATGTYNLQEIVPGSVWMER |
| | | | DVYLQGPIWAKIPETGAHFHPSPAMGGFGLKHPPPMMLIKNTPVPGNITS |
| | | | FSDVPVSSFITQYSTGQVTVEMEWELKKENSKRWNPEIQYTNNYNDPQFV |
| | | | DFAPDSTGEYRTTRPIGTRYLTRPL* |
| 142 | 36 | VP1_nt | ATGTCTTTTGTTGATCACCCTCCAGATTGGTTGGAAGAAGTTGGTGAAGG |
| | | | TCTTCGCGAGTTTTTGGGCCTTGAAGCGGGCCCACCGAAACCAAAACCCA |
| | | | ATGGGCAGCAGCATCAAGATCAAGCCCGTGGTCTTGTGCTGCCTGGTTAT |
| | | | AACTATCTCGGACCCGGAAACGGGCTCGATCGAGGAGAGCCTGTCAACAG |
| | | | GGCAGACGAGGTCGCGCGAGAGCACGACATCTCGTACAACGAGCAGCTTG |
| | | | AGGCGGGAGACAACCCCTACCTCAAGTACAACCACGCGGACGCCGAGTTT |
| | | | CAGGAGAAGCTCGCCGACGACACATCCTTCGGGGGAAACCTCGGAAAGGC |
| | | | AGTCTTTCAGGCCAAGAAAAGGGTTCTCGAACCTTTTGGCCTGGTTGAAG |
| | | | AGGGTGCTAAGACGGCCCCTACCGGAAAGCGGATAGACGACCACTTTCCA |
| | | | AAAAGAAAGAAGGCTCGGACCGAAGAGGACTCCAAGCCTTCCACCTCGTC |
| | | | AGACGCCGAAGCTGGACCCAGCGGATCCCAGCAGCTGCAAATCCCAGCCC |
| | | | AACCAGCCTCAAGTTTGGGAGCTGATACAATGTCTGCGGGAGGTGGCGGC |
| | | | CCATTGGGCGACAATAACCAAGGTGCCGATGGAGTGGGCAATGCCTCGGG |
| | | | AGATTGGCATTGCGATTCCACGTGGATGGGGGACAGAGTCGTCACCAAGT |
| | | | CCACCCGAACCTGGGTGCTGCCCAGCTACAACAACCACCAGTACCGAGAG |
| | | | ATCAAAAGCGGCTCCGTCGACGGAAGCAACGCCAACGCCTACTTTGGATA |
| | | | CAGCACCCCCTGGGGGTACTTTGACTTTAACCGCTTCCACAGCCACTGGA |
| | | | GCCCCCGAGACTGGCAAAGACTCATCAACAACTACTGGGGCTTCAGACCC |
| | | | CGGTCCCTCAGAGTCAAAATCTTCAACATTCAAGTCAAAGAGGTCACGGT |
| | | | GCAGGACTCCACCACCACCATCGCCAACAACCTCACCTCCACCGTCCAAG |
| | | | TGTTTACGGACGACGACTACCAGCTGCCCTACGTCGTCGGCAACGGGACC |
| | | | GAGGGATGCCTGCCGGCCTTCCCTCCGCAGGTCTTTACGCTGCCGCAGTA |
| | | | CGGTTACGCGACGCTGAACCGCGACAACACAGAAAATCCCACCGAGAGGA |
| | | | GCAGCTTCTTCTGCCTAGAGTACTTTCCCAGCAAGATGCTGAGAACGGGC |
| | | | AACAACTTTGAGTTTACCTACAACTTTGAGGAGGTGCCCTTCCACTCCAG |
| | | | CTTCGCTCCCAGTCAGAACCTGTTCAAGCTGGCCAACCCGCTGGTGGACC |
| | | | AGTACTTGTACCGCTTCGTGAGCACAAATAACACTGGCGGAGTCCAGTTC |
| | | | AACAAGAACCTGGCCGGGAGATACGCCAACACCTACAAAAACTGGTTCCC |
| | | | GGGGCCCATGGGCCGAACCCAGGGCTGGAACCTGGGCTCCGGGGTCAACC |
| | | | GCGCCAGTGTCAGCGCCTTCGCCACGACCAATAGGATGGAGCTCGAGGGC |
| | | | GCGAGTTACCAGGTGCCCCCGCAGCCGAACGGCATGACCAACAACCTCCA |
| | | | GGGCAGCAACACCTATGCCCTGGAGAACACTATGATCTTCAACAGCCAGC |
| | | | CGGCGAACCCGGGCACCACCGCCACGTACCTCGAGGGCAACATGCTCATC |
| | | | ACCAGCGAGAGCGAGACACAGCCGGTGAACCGCGTGGCGTACAACGTCGG |
| | | | CGGGCAGATGGCCACCAACAACCAGAGCTCCACCACTGCCCCCGCGACCG |
| | | | GCACGTACAACCTCCAGGAAATCGTGCCCGGCAGCGTGTGGATGGAGAGG |
| | | | GACGTGTACCTCCAAGGACCCATCTGGGCCAAGATCCCAGAGACAGGGGC |
| | | | GCACTTTCACCCCTCTCCGGCCATGGGCGGATTCGGACTCAAACACCCAC |
| | | | CGCCCATGATGCTCATCAAGAACACGCCTGTGCCCGGAAATATCACCAGC |
| | | | TTCTCGGACGTGCCCGTCAGCAGCTTCATCACCCAGTACAGCACCGGGCA |
| | | | GGTCACCGTGGAGATGGAGTGGGAGCTCAAGAAGGAAAACTCCAAGAGGT |
| | | | GGAACCCAGAGATCCAGTACACAAACAACTACAACGACCCCCAGTTTGTG |
| | | | GACTTTGCCCCGGACAGCACCGGGGAATACAGAACCACCAGACCTATCGG |
| | | | AACCCGATACCTTACCCGACCCCTTTAA |
| 143 | 36 | MAAP_aa | MGSSIKIKPVVLCCLVITISDPETGSIEESLSTGQTRSRESTTSRTTSSL |
| | | | RRETTPTSSTTTRTPSFRRSSPTTHPSGETSERQSFRPRKGFSNLLAWLK |
| | | | RVLRRPLPESG* |
| 144 | 36 | MAAP_nt | ATGGGCAGCAGCATCAAGATCAAGCCCGTGGTCTTGTGCTGCCTGGTTAT |
| | | | AACTATCTCGGACCCGGAAACGGGCTCGATCGAGGAGAGCCTGTCAACAG |
| | | | GGCAGACGAGGTCGCGCGAGAGCACGACATCTCGTACAACGAGCAGCTTG |
| | | | AGGCGGGAGACAACCCCTACCTCAAGTACAACCACGCGGACGCCGAGTTT |
| | | | CAGGAGAAGCTCGCCGACGACACATCCTTCGGGGGAAACCTCGGAAAGGC |
| | | | AGTCTTTCAGGCCAAGAAAAGGGTTCTCGAACCTTTTGGCCTGGTTGAAG |
| | | | AGGGTGCTAAGACGGCCCCTACCGGAAAGCGGATAG |
| 145 | 37 | VP1_aa | MSFVDHPPDWLEEVGEGLREFLGLEAGPPKPKPNRVHDQSRGLVFPGYKY |
| | | | LGPGNGLDRGEPVNRADEVAREHDISYNEQLEAGDNPYLKYNHADAEFQE |
| | | | KLADDTSFGGNLGKAVFQAKKRVLEPFGLVEEGAKTAPTGKRIDDHFPKR |
| | | | KKARTEEDSKPSTSSDAEAGPSGSQQLQIPAQPASSLGADTMSAGGGGPL |
| | | | GDNNQGADGVGNASGDWHCDSTWMGDRVVTKSTRTWVLPSYNNHQYREIK |
| | | | SGSVDGSNANAYFGYSTPWGYFDFNRFHSHWSPRDWQRLINNYWGFRPRS |
| | | | LRVKIFNIQVKEVTVQDSTTTIANNLTSTVQVFTDDDYQLPYVVGNGTEG |
| | | | CLPAFPPQVFTLPQYGYATLNRDNTENPTERSSFFCLEYFPSKMLRTGNN |
| | | | FEFTYNFEEVPFHSSFAPSQNLFKLANPLVDQYLYRFVSTNNTGGVQFNK |
| | | | NLAGRYANTYKNWFPGPMGRTQGWNLGSGVNRASVSAFATTNRMELEGAS |
| | | | YQVPPQPNGMTNNLQGSNTYALENTMIFNSQPANPGTTATYLEGNMLITS |
| | | | ESETQPVNRVAYNVGGQMATNNQSSTTAPATGTYNLQEIVPGSVWMERDV |
| | | | YLQGPIWAKIPETGAHFHPSPAMGGFGLKHPPPMMLIKNTPVPGNITSFS |
| | | | DVPVSSFITQYSTGQVTVEMEWELKKENSKRWNPEIQYTNNYNDPQFVDF |
| | | | APDSTGEYRTTRPIGTRYLTRPL* |
| 146 | 37 | VP1_nt | ATGTCTTTTGTTGATCACCCTCCAGATTGGTTGGAAGAAGTTGGTGAAGG |
| | | | TCTTCGCGAGTTTTTGGGCCTTGAAGCGGGCCCACCGAAACCAAAACCCA |
| | | | ATAGGGTACATGATCAATCTCGTGGTCTTGTGTTTCCTGGTTATAAGTAT |
| | | | CTCGGACCCGGAAACGGGCTCGATCGAGGAGAGCCTGTCAACAGGGCAGA |
| | | | CGAGGTCGCGCGAGAGCACGACATCTCGTACAACGAGCAGCTTGAGGCGG |
| | | | GAGACAACCCCTACCTCAAGTACAACCACGCGGACGCCGAGTTTCAGGAG |
| | | | AAGCTCGCCGACGACACATCCTTCGGGGGAAACCTCGGAAAGGCAGTCTT |
| | | | TCAGGCCAAGAAAAGGGTTCTCGAACCTTTTGGCCTGGTTGAAGAGGGTG |
| | | | CTAAGACGGCCCCTACCGGAAAGCGGATAGACGACCACTTTCCAAAAAGA |
| | | | AAGAAGGCTCGGACCGAAGAGGACTCCAAGCCTTCCACCTCGTCAGACGC |
| | | | CGAAGCTGGACCCAGCGGATCCCAGCAGCTGCAAATCCCAGCCCAACCAG |
| | | | CCTCAAGTTTGGGAGCTGATACAATGTCTGCGGGAGGTGGCGGCCCATTG |
| | | | GGCGACAATAACCAAGGTGCCGATGGAGTGGGCAATGCCTCGGGAGATTG |
| | | | GCATTGCGATTCCACGTGGATGGGGGACAGAGTCGTCACCAAGTCCACCC |
| | | | GAACCTGGGTGCTGCCCAGCTACAACAACCACCAGTACCGAGAGATCAAA |
| | | | AGCGGCTCCGTCGACGGAAGCAACGCCAACGCCTACTTTGGATACAGCAC |
| | | | CCCCTGGGGGTACTTTGACTTTAACCGCTTCCACAGCCACTGGAGCCCCC |
| | | | GAGACTGGCAAAGACTCATCAACAACTACTGGGGCTTCAGACCCCGGTCC |
| | | | CTCAGAGTCAAAATCTTCAACATTCAAGTCAAAGAGGTCACGGTGCAGGA |
| | | | CTCCACCACCACCATCGCCAACAACCTCACCTCCACCGTCCAAGTGTTTA |
| | | | CGGACGACGACTACCAGCTGCCCTACGTCGTCGGCAACGGGACCGAGGGA |
| | | | TGCCTGCCGGCCTTCCCTCCGCAGGTCTTTACGCTGCCGCAGTACGGTTA |
| | | | CGCGACGCTGAACCGCGACAACACAGAAAATCCCACCGAGAGGAGCAGCT |
| | | | TCTTCTGCCTAGAGTACTTTCCCAGCAAGATGCTGAGAACGGGCAACAAC |
| | | | TTTGAGTTTACCTACAACTTTGAGGAGGTGCCCTTCCACTCCAGCTTCGC |
| | | | TCCCAGTCAGAACCTGTTCAAGCTGGCCAACCCGCTGGTGGACCAGTACT |
| | | | TGTACCGCTTCGTGAGCACAAATAACACTGGCGGAGTCCAGTTCAACAAG |
| | | | AACCTGGCCGGGAGATACGCCAACACCTACAAAAACTGGTTCCCGGGGCC |
| | | | CATGGGCCGAACCCAGGGCTGGAACCTGGGCTCCGGGGTCAACCGCGCCA |
| | | | GTGTCAGCGCCTTCGCCACGACCAATAGGATGGAGCTCGAGGGCGCGAGT |
| | | | TACCAGGTGCCCCCGCAGCCGAACGGCATGACCAACAACCTCCAGGGCAG |
| | | | CAACACCTATGCCCTGGAGAACACTATGATCTTCAACAGCCAGCCGGCGA |
| | | | ACCCGGGCACCACCGCCACGTACCTCGAGGGCAACATGCTCATCACCAGC |
| | | | GAGAGCGAGACACAGCCGGTGAACCGCGTGGCGTACAACGTCGGCGGGCA |
| | | | GATGGCCACCAACAACCAGAGCTCCACCACTGCCCCCGCGACCGGCACGT |
| | | | ACAACCTCCAGGAAATCGTGCCCGGCAGCGTGTGGATGGAGAGGGACGTG |
| | | | TACCTCCAAGGACCCATCTGGGCCAAGATCCCAGAGACAGGGGCGCACTT |
| | | | TCACCCCTCTCCGGCCATGGGCGGATTCGGACTCAAACACCCACCGCCCA |
| | | | TGATGCTCATCAAGAACACGCCTGTGCCCGGAAATATCACCAGCTTCTCG |
| | | | GACGTGCCCGTCAGCAGCTTCATCACCCAGTACAGCACCGGGCAGGTCAC |
| | | | CGTGGAGATGGAGTGGGAGCTCAAGAAGGAAAACTCCAAGAGGTGGAACC |
| | | | CAGAGATCCAGTACACAAACAACTACAACGACCCCCAGTTTGTGGACTTT |
| | | | GCCCCGGACAGCACCGGGGAATACAGAACCACCAGACCTATCGGAACCCG |
| | | | ATACCTTACCCGACCCCTTTAA |
| 147 | 37 | MAAP_aa | MINLVVLCFLVISISDPETGSIEESLSTGQTRSRESTTSRTTSSLRRETT |
| | | | PTSSTTTRTPSFRRSSPTTHPSGETSERQSFRPRKGFSNLLAWLKRVLRR |
| | | | PLPESG* |
| 148 | 37 | MAAP_nt | ATGATCAATCTCGTGGTCTTGTGTTTCCTGGTTATAAGTATCTCGGACCC |
| | | | GGAAACGGGCTCGATCGAGGAGAGCCTGTCAACAGGGCAGACGAGGTCGC |
| | | | GCGAGAGCACGACATCTCGTACAACGAGCAGCTTGAGGCGGGAGACAACC |
| | | | CCTACCTCAAGTACAACCACGCGGACGCCGAGTTTCAGGAGAAGCTCGCC |
| | | | GACGACACATCCTTCGGGGGAAACCTCGGAAAGGCAGTCTTTCAGGCCAA |
| | | | GAAAAGGGTTCTCGAACCTTTTGGCCTGGTTGAAGAGGGTGCTAAGACGG |
| | | | CCCCTACCGGAAAGCGGATAG |
| 149 | 38 | VP1_aa | MSFVDHPPDWLEEVGEGLREFLDGLEAGPPKPKPNQQHQDQARGLVLPGY |
| | | | NYLGPGNGLDRGEPVNRADEVAREHDISYNEQLEAGDNPYLKYNHADAEF |
| | | | QEKLADDTSFGGNLGKAVFQAKKRVLEPFGLVEEGAKTAPTGKRIDDHFP |
| | | | KRKKARTEEDSKPSTSSDAEAGPSGSQQLQIPAQPASSLGADTMSAGGGG |
| | | | PLGDNNQGADGVGNASGDWHCDSTWMGDRVVTKSTRTWVLPSYNNHQYRE |
| | | | IKSGSVDGSNANAYFGYSTPWGYFDFNRFHSHWSPRDWQRLINNYWGFRP |
| | | | RSLRVKIFNIQVKEVTVQDSTTTIANNLTSTVQVFTDDDYQLPYVVGNGT |
| | | | EGCLPAFPPQVFTLPQYGYATLNRDNTENPTERSSFFCLEYFPSKMLRTG |
| | | | NNFEFTYNFEEVPFHSSFAPSQNLFKLANPLVDQYLYRFVSTNNTGGVQF |
| | | | NKNLAGRYANTYKNWFPGPMGRTQGWNLGSGVNRASVSAFATTNRMELEG |
| | | | ASYQVPPQPNGMTNNLQGSNTYALENTMIFNSQPANPGTTATYLEGNMLI |
| | | | TSESETQPVNRVAYNVGGQMATNNQSSTTAPATGTYNLQEIVPGSVWMER |
| | | | DVYLQGPIWAKIPETGAHFHPSPAMGGFGLKHPPPMMLIKNTPVPGNITS |
| | | | FSDVPVSSFITQYSTGQVTVEMEWELKKENSKRWNPEIQYTNNYNDPQFV |
| | | | DFAPDSTGEYRTTRPIGTRYLTRPL* |
| 150 | 38 | VP1_nt | ATGTCTTTTGTTGATCACCCTCCAGATTGGTTGGAAGAAGTTGGTGAAGG |
| | | | CCTTCGCGAGTTTTTGGATGGCCTTGAAGCGGGCCCACCGAAACCAAAAC |
| | | | CCAATCAGCAGCATCAAGATCAAGCCCGTGGTCTTGTGCTGCCTGGTTAT |
| | | | AACTATCTCGGACCCGGAAACGGGCTCGATCGAGGAGAGCCTGTCAACAG |
| | | | GGCAGACGAGGTCGCGCGAGAGCACGACATCTCGTACAACGAGCAGCTTG |
| | | | AGGCGGGAGACAACCCCTACCTCAAGTACAACCACGCGGACGCCGAGTTT |
| | | | CAGGAGAAGCTCGCCGACGACACATCCTTCGGGGGAAACCTCGGAAAGGC |
| | | | AGTCTTTCAGGCCAAGAAAAGGGTTCTCGAACCTTTTGGCCTGGTTGAAG |
| | | | AGGGTGCTAAGACGGCCCCTACCGGAAAGCGGATAGACGACCACTTTCCA |
| | | | AAAAGAAAGAAGGCTCGGACCGAAGAGGACTCCAAGCCTTCCACCTCGTC |
| | | | AGACGCCGAAGCTGGACCCAGCGGATCCCAGCAGCTGCAAATCCCAGCCC |
| | | | AACCAGCCTCAAGTTTGGGAGCTGATACAATGTCTGCGGGAGGTGGCGGC |
| | | | CCATTGGGCGACAATAACCAAGGTGCCGATGGAGTGGGCAATGCCTCGGG |
| | | | AGATTGGCATTGCGATTCCACGTGGATGGGGGACAGAGTCGTCACCAAGT |
| | | | CCACCCGAACCTGGGTGCTGCCCAGCTACAACAACCACCAGTACCGAGAG |
| | | | ATCAAAAGCGGCTCCGTCGACGGAAGCAACGCCAACGCCTACTTTGGATA |
| | | | CAGCACCCCCTGGGGGTACTTTGACTTTAACCGCTTCCACAGCCACTGGA |
| | | | GCCCCCGAGACTGGCAAAGACTCATCAACAACTACTGGGGCTTCAGACCC |
| | | | CGGTCCCTCAGAGTCAAAATCTTCAACATTCAAGTCAAAGAGGTCACGGT |
| | | | GCAGGACTCCACCACCACCATCGCCAACAACCTCACCTCCACCGTCCAAG |
| | | | TGTTTACGGACGACGACTACCAGCTGCCCTACGTCGTCGGCAACGGGACC |
| | | | GAGGGATGCCTGCCGGCCTTCCCTCCGCAGGTCTTTACGCTGCCGCAGTA |
| | | | CGGTTACGCGACGCTGAACCGCGACAACACAGAAAATCCCACCGAGAGGA |
| | | | GCAGCTTCTTCTGCCTAGAGTACTTTCCCAGCAAGATGCTGAGAACGGGC |
| | | | AACAACTTTGAGTTTACCTACAACTTTGAGGAGGTGCCCTTCCACTCCAG |
| | | | CTTCGCTCCCAGTCAGAACCTGTTCAAGCTGGCCAACCCGCTGGTGGACC |
| | | | AGTACTTGTACCGCTTCGTGAGCACAAATAACACTGGCGGAGTCCAGTTC |
| | | | AACAAGAACCTGGCCGGGAGATACGCCAACACCTACAAAAACTGGTTCCC |
| | | | GGGGCCCATGGGCCGAACCCAGGGCTGGAACCTGGGCTCCGGGGTCAACC |
| | | | GCGCCAGTGTCAGCGCCTTCGCCACGACCAATAGGATGGAGCTCGAGGGC |
| | | | GCGAGTTACCAGGTGCCCCCGCAGCCGAACGGCATGACCAACAACCTCCA |
| | | | GGGCAGCAACACCTATGCCCTGGAGAACACTATGATCTTCAACAGCCAGC |
| | | | CGGCGAACCCGGGCACCACCGCCACGTACCTCGAGGGCAACATGCTCATC |
| | | | ACCAGCGAGAGCGAGACACAGCCGGTGAACCGCGTGGCGTACAACGTCGG |
| | | | CGGGCAGATGGCCACCAACAACCAGAGCTCCACCACTGCCCCCGCGACCG |
| | | | GCACGTACAACCTCCAGGAAATCGTGCCCGGCAGCGTGTGGATGGAGAGG |
| | | | GACGTGTACCTCCAAGGACCCATCTGGGCCAAGATCCCAGAGACAGGGGC |
| | | | GCACTTTCACCCCTCTCCGGCCATGGGCGGATTCGGACTCAAACACCCAC |
| | | | CGCCCATGATGCTCATCAAGAACACGCCTGTGCCCGGAAATATCACCAGC |
| | | | TTCTCGGACGTGCCCGTCAGCAGCTTCATCACCCAGTACAGCACCGGGCA |
| | | | GGTCACCGTGGAGATGGAGTGGGAGCTCAAGAAGGAAAACTCCAAGAGGT |
| | | | GGAACCCAGAGATCCAGTACACAAACAACTACAACGACCCCCAGTTTGTG |
| | | | GACTTTGCCCCGGACAGCACCGGGGAATACAGAACCACCAGACCTATCGG |
| | | | AACCCGATACCTTACCCGACCCCTTTAA |
| 151 | 38 | MAAP_aa | MALKRAHRNQNPISSIKIKPVVLCCLVITISDPETGSIEESLSTGQTRSR |
| | | | ESTTSRTTSSLRRETTPTSSTTTRTPSFRRSSPTTHPSGETSERQSFRPR |
| | | | KGFSNLLAWLKRVLRRPLPESG* |
| 152 | 38 | MAAP_nt | ATGGCCTTGAAGCGGGCCCACCGAAACCAAAACCCAATCAGCAGCATCAA |
| | | | GATCAAGCCCGTGGTCTTGTGCTGCCTGGTTATAACTATCTCGGACCCGG |
| | | | AAACGGGCTCGATCGAGGAGAGCCTGTCAACAGGGCAGACGAGGTCGCGC |
| | | | GAGAGCACGACATCTCGTACAACGAGCAGCTTGAGGCGGGAGACAACCCC |
| | | | TACCTCAAGTACAACCACGCGGACGCCGAGTTTCAGGAGAAGCTCGCCGA |
| | | | CGACACATCCTTCGGGGGAAACCTCGGAAAGGCAGTCTTTCAGGCCAAGA |
| | | | AAAGGGTTCTCGAACCTTTTGGCCTGGTTGAAGAGGGTGCTAAGACGGCC |
| | | | CCTACCGGAAAGCGGATAG |
| 153 | 39 | VP1_aa | MSFVDHPPDWLEEVGEGLREFLGLYAGPPKPDPNQQHQDQARGLVLPGYN |
| | | | YLGPGNGLDRGEPVNRADEVAREHDISYNEQLEAGDNPYLKYNHADAEFQ |
| | | | EKLADDTSFGGNLGKAVFQAKKRVLEPFGLVEEGAKTAPTGKRIDDHFPK |
| | | | RKKARTEEDSKPSTSSDAEAGPSGSQQLQIPAQPASSLGADTMSAGGGGP |
| | | | LGDNNQGADGVGNASGDWHCDSTWMGDRVVTKSTRTWVLPSYNNHQYREI |
| | | | KSGSVDGSNANAYFGYSTPWGYFDFNRFHSHWSPRDWQRLINNYWGFRPR |
| | | | SLRVKIFNIQVKEVTVQDSTTTIANNLTSTVQVFTDDDYQLPYVVGNGTE |
| | | | GCLPAFPPQVFTLPQYGYATLNRDNTENPTERSSFFCLEYFPSKMLRTGN |
| | | | NFEFTYNFEEVPFHSSFAPSQNLFKLANPLVDQYLYRFVSTNNTGGVQFN |
| | | | KNLAGRYANTYKNWFPGPMGRTQGWNLGSGVNRASVSAFATTNRMELEGA |
| | | | SYQVPPQPNGMTNNLQGSNTYALENTMIFNSQPANPGTTATYLEGNMLIT |
| | | | SESETQPVNRVAYNVGGQMATNNQSSTTAPATGTYNLQEIVPGSVWMERD |
| | | | VYLQGPIWAKIPETGAHFHPSPAMGGFGLKHPPPMMLIKNTPVPGNITSF |
| | | | SDVPVSSFITQYSTGQVTVEMEWELKKENSKRWNPEIQYTNNYNDPQFVD |
| | | | FAPDSTGEYRTTRPIGTRYLTRPL* |
| 154 | 39 | VP1_nt | ATGTCTTTTGTTGATCACCCTCCAGATTGGTTGGAAGAAGTTGGTGAAGG |
| | | | GCTTCGCGAGTTTTTGGGCCTTTATGCGGGCCCACCGAAACCAGACCCCA |
| | | | ATCAGCAGCATCAAGATCAAGCCCGTGGTCTTGTGCTGCCTGGTTATAAC |
| | | | TATCTCGGACCCGGAAACGGGCTCGATCGAGGAGAGCCTGTCAACAGGGC |
| | | | AGACGAGGTCGCGCGAGAGCACGACATCTCGTACAACGAGCAGCTTGAGG |
| | | | CGGGAGACAACCCCTACCTCAAGTACAACCACGCGGACGCCGAGTTTCAG |
| | | | GAGAAGCTCGCCGACGACACATCCTTCGGGGGAAACCTCGGAAAGGCAGT |
| | | | CTTTCAGGCCAAGAAAAGGGTTCTCGAACCTTTTGGCCTGGTTGAAGAGG |
| | | | GTGCTAAGACGGCCCCTACCGGAAAGCGGATAGACGACCACTTTCCAAAA |
| | | | AGAAAGAAGGCTCGGACCGAAGAGGACTCCAAGCCTTCCACCTCGTCAGA |
| | | | CGCCGAAGCTGGACCCAGCGGATCCCAGCAGCTGCAAATCCCAGCCCAAC |
| | | | CAGCCTCAAGTTTGGGAGCTGATACAATGTCTGCGGGAGGTGGCGGCCCA |
| | | | TTGGGCGACAATAACCAAGGTGCCGATGGAGTGGGCAATGCCTCGGGAGA |
| | | | TTGGCATTGCGATTCCACGTGGATGGGGGACAGAGTCGTCACCAAGTCCA |
| | | | CCCGAACCTGGGTGCTGCCCAGCTACAACAACCACCAGTACCGAGAGATC |
| | | | AAAAGCGGCTCCGTCGACGGAAGCAACGCCAACGCCTACTTTGGATACAG |
| | | | CACCCCCTGGGGGTACTTTGACTTTAACCGCTTCCACAGCCACTGGAGCC |
| | | | CCCGAGACTGGCAAAGACTCATCAACAACTACTGGGGCTTCAGACCCCGG |
| | | | TCCCTCAGAGTCAAAATCTTCAACATTCAAGTCAAAGAGGTCACGGTGCA |
| | | | GGACTCCACCACCACCATCGCCAACAACCTCACCTCCACCGTCCAAGTGT |
| | | | TTACGGACGACGACTACCAGCTGCCCTACGTCGTCGGCAACGGGACCGAG |
| | | | GGATGCCTGCCGGCCTTCCCTCCGCAGGTCTTTACGCTGCCGCAGTACGG |
| | | | TTACGCGACGCTGAACCGCGACAACACAGAAAATCCCACCGAGAGGAGCA |
| | | | GCTTCTTCTGCCTAGAGTACTTTCCCAGCAAGATGCTGAGAACGGGCAAC |
| | | | AACTTTGAGTTTACCTACAACTTTGAGGAGGTGCCCTTCCACTCCAGCTT |
| | | | CGCTCCCAGTCAGAACCTGTTCAAGCTGGCCAACCCGCTGGTGGACCAGT |
| | | | ACTTGTACCGCTTCGTGAGCACAAATAACACTGGCGGAGTCCAGTTCAAC |
| | | | AAGAACCTGGCCGGGAGATACGCCAACACCTACAAAAACTGGTTCCCGGG |
| | | | GCCCATGGGCCGAACCCAGGGCTGGAACCTGGGCTCCGGGGTCAACCGCG |
| | | | CCAGTGTCAGCGCCTTCGCCACGACCAATAGGATGGAGCTCGAGGGCGCG |
| | | | AGTTACCAGGTGCCCCCGCAGCCGAACGGCATGACCAACAACCTCCAGGG |
| | | | CAGCAACACCTATGCCCTGGAGAACACTATGATCTTCAACAGCCAGCCGG |
| | | | CGAACCCGGGCACCACCGCCACGTACCTCGAGGGCAACATGCTCATCACC |
| | | | AGCGAGAGCGAGACACAGCCGGTGAACCGCGTGGCGTACAACGTCGGCGG |
| | | | GCAGATGGCCACCAACAACCAGAGCTCCACCACTGCCCCCGCGACCGGCA |
| | | | CGTACAACCTCCAGGAAATCGTGCCCGGCAGCGTGTGGATGGAGAGGGAC |
| | | | GTGTACCTCCAAGGACCCATCTGGGCCAAGATCCCAGAGACAGGGGCGCA |
| | | | CTTTCACCCCTCTCCGGCCATGGGCGGATTCGGACTCAAACACCCACCGC |
| | | | CCATGATGCTCATCAAGAACACGCCTGTGCCCGGAAATATCACCAGCTTC |
| | | | TCGGACGTGCCCGTCAGCAGCTTCATCACCCAGTACAGCACCGGGCAGGT |
| | | | CACCGTGGAGATGGAGTGGGAGCTCAAGAAGGAAAACTCCAAGAGGTGGA |
| | | | ACCCAGAGATCCAGTACACAAACAACTACAACGACCCCCAGTTTGTGGAC |
| | | | TTTGCCCCGGACAGCACCGGGGAATACAGAACCACCAGACCTATCGGAAC |
| | | | CCGATACCTTACCCGACCCCTTTAA |
| 155 | 39 | MAAP_aa | MRAHRNQTPISSIKIKPVVLCCLVITISDPETGSIEESLSTGQTRSREST |
| | | | TSRTTSSLRRETTPTSSTTTRTPSFRRSSPTTHPSGETSERQSFRPRKGF |
| | | | SNLLAWLKRVLRRPLPESG* |
| 156 | 39 | MAAP_nt | ATGCGGGCCCACCGAAACCAGACCCCAATCAGCAGCATCAAGATCAAGCC |
| | | | CGTGGTCTTGTGCTGCCTGGTTATAACTATCTCGGACCCGGAAACGGGCT |
| | | | CGATCGAGGAGAGCCTGTCAACAGGGCAGACGAGGTCGCGCGAGAGCACG |
| | | | ACATCTCGTACAACGAGCAGCTTGAGGCGGGAGACAACCCCTACCTCAAG |
| | | | TACAACCACGCGGACGCCGAGTTTCAGGAGAAGCTCGCCGACGACACATC |
| | | | CTTCGGGGGAAACCTCGGAAAGGCAGTCTTTCAGGCCAAGAAAAGGGTTC |
| | | | TCGAACCTTTTGGCCTGGTTGAAGAGGGTGCTAAGACGGCCCCTACCGGA |
| | | | AAGCGGATAG |
| 157 | 40 | VP1_aa | MSFVDHPPDWLEEVGEGLREFLGLEAGPPKPKPNQQHQDQARGLVLPGYN |
| | | | YLGPGNGLDRGEPVNRADEVAREHDKAYDRQLDAGDNPYLKYNHADAEFQ |
| | | | EKLADDTSFGGNLGKAVFQAKKRVLEPFGLVEEGAKTAPTGKRIDDHFPK |
| | | | RKKARTEEDSKPSTSSDAEAGPSGSQQLQIPAQPASSLGADTMSAGGGGP |
| | | | LGDNNQGADGVGNASGDWHCDSTWMGDRVVTKSTRTWVLPSYNNHQYREI |
| | | | KSGSVDGSNANAYFGYSTPWGYFDFNRFHSHWSPRDWQRLINNYWGFRPR |
| | | | SLRVKIFNIQVKEVTVQDSTTTIANNLTSTVQVFTDDDYQLPYVVGNGTE |
| | | | GCLPAFPPQVFTLPQYGYATLNRDNTENPTERSSFFCLEYFPSKMLRTGN |
| | | | NFEFTYNFEEVPFHSSFAPSQNLFKLANPLVDQYLYRFVSTNNTGGVQFN |
| | | | KNLAGRYANTYKNWFPGPMGRTQGWNLGSGVNRASVSAFATTNRMELEGA |
| | | | SYQVPPQPNGMTNNLQGSNTYALENTMIFNSQPANPGTTATYLEGNMLIT |
| | | | SESETQPVNRVAYNVGGQMATNNQSSTTAPATGTYNLQEIVPGSVWMERD |
| | | | VYLQGPIWAKIPETGAHFHPSPAMGGFGLKHPPPMMLIKNTPVPGNITSF |
| | | | SDVPVSSFITQYSTGQVTVEMEWELKKENSKRWNPEIQYTNNYNDPQFVD |
| | | | FAPDSTGEYRTTRPIGTRYLTRPL* |
| 158 | 40 | VP1_nt | ATGTCTTTTGTTGATCACCCTCCAGATTGGTTGGAAGAAGTTGGTGAAGG |
| | | | TCTTCGCGAGTTTTTGGGCCTTGAAGCGGGCCCACCGAAACCAAAACCCA |
| | | | ATCAGCAGCATCAAGATCAAGCCCGTGGTCTTGTGCTGCCTGGTTATAAC |
| | | | TATCTCGGACCCGGAAACGGGCTCGATCGAGGAGAGCCTGTCAACAGGGC |
| | | | AGACGAGGTCGCGCGAGAGCACGACAAAGCCTACGATCGGCAGCTTGATG |
| | | | CGGGAGACAACCCCTACCTCAAGTACAACCACGCGGACGCCGAGTTTCAG |
| | | | GAGAAGCTCGCCGACGACACATCCTTCGGGGGAAACCTCGGAAAGGCAGT |
| | | | CTTTCAGGCCAAGAAAAGGGTTCTCGAACCTTTTGGCCTGGTTGAAGAGG |
| | | | GTGCTAAGACGGCCCCTACCGGAAAGCGGATAGACGACCACTTTCCAAAA |
| | | | AGAAAGAAGGCTCGGACCGAAGAGGACTCCAAGCCTTCCACCTCGTCAGA |
| | | | CGCCGAAGCTGGACCCAGCGGATCCCAGCAGCTGCAAATCCCAGCCCAAC |
| | | | CAGCCTCAAGTTTGGGAGCTGATACAATGTCTGCGGGAGGTGGCGGCCCA |
| | | | TTGGGCGACAATAACCAAGGTGCCGATGGAGTGGGCAATGCCTCGGGAGA |
| | | | TTGGCATTGCGATTCCACGTGGATGGGGGACAGAGTCGTCACCAAGTCCA |
| | | | CCCGAACCTGGGTGCTGCCCAGCTACAACAACCACCAGTACCGAGAGATC |
| | | | AAAAGCGGCTCCGTCGACGGAAGCAACGCCAACGCCTACTTTGGATACAG |
| | | | CACCCCCTGGGGGTACTTTGACTTTAACCGCTTCCACAGCCACTGGAGCC |
| | | | CCCGAGACTGGCAAAGACTCATCAACAACTACTGGGGCTTCAGACCCCGG |
| | | | TCCCTCAGAGTCAAAATCTTCAACATTCAAGTCAAAGAGGTCACGGTGCA |
| | | | GGACTCCACCACCACCATCGCCAACAACCTCACCTCCACCGTCCAAGTGT |
| | | | TTACGGACGACGACTACCAGCTGCCCTACGTCGTCGGCAACGGGACCGAG |
| | | | GGATGCCTGCCGGCCTTCCCTCCGCAGGTCTTTACGCTGCCGCAGTACGG |
| | | | TTACGCGACGCTGAACCGCGACAACACAGAAAATCCCACCGAGAGGAGCA |
| | | | GCTTCTTCTGCCTAGAGTACTTTCCCAGCAAGATGCTGAGAACGGGCAAC |
| | | | AACTTTGAGTTTACCTACAACTTTGAGGAGGTGCCCTTCCACTCCAGCTT |
| | | | CGCTCCCAGTCAGAACCTGTTCAAGCTGGCCAACCCGCTGGTGGACCAGT |
| | | | ACTTGTACCGCTTCGTGAGCACAAATAACACTGGCGGAGTCCAGTTCAAC |
| | | | AAGAACCTGGCCGGGAGATACGCCAACACCTACAAAAACTGGTTCCCGGG |
| | | | GCCCATGGGCCGAACCCAGGGCTGGAACCTGGGCTCCGGGGTCAACCGCG |
| | | | CCAGTGTCAGCGCCTTCGCCACGACCAATAGGATGGAGCTCGAGGGCGCG |
| | | | AGTTACCAGGTGCCCCCGCAGCCGAACGGCATGACCAACAACCTCCAGGG |
| | | | CAGCAACACCTATGCCCTGGAGAACACTATGATCTTCAACAGCCAGCCGG |
| | | | CGAACCCGGGCACCACCGCCACGTACCTCGAGGGCAACATGCTCATCACC |
| | | | AGCGAGAGCGAGACACAGCCGGTGAACCGCGTGGCGTACAACGTCGGCGG |
| | | | GCAGATGGCCACCAACAACCAGAGCTCCACCACTGCCCCCGCGACCGGCA |
| | | | CGTACAACCTCCAGGAAATCGTGCCCGGCAGCGTGTGGATGGAGAGGGAC |
| | | | GTGTACCTCCAAGGACCCATCTGGGCCAAGATCCCAGAGACAGGGGCGCA |
| | | | CTTTCACCCCTCTCCGGCCATGGGCGGATTCGGACTCAAACACCCACCGC |
| | | | CCATGATGCTCATCAAGAACACGCCTGTGCCCGGAAATATCACCAGCTTC |
| | | | TCGGACGTGCCCGTCAGCAGCTTCATCACCCAGTACAGCACCGGGCAGGT |
| | | | CACCGTGGAGATGGAGTGGGAGCTCAAGAAGGAAAACTCCAAGAGGTGGA |
| | | | ACCCAGAGATCCAGTACACAAACAACTACAACGACCCCCAGTTTGTGGAC |
| | | | TTTGCCCCGGACAGCACCGGGGAATACAGAACCACCAGACCTATCGGAAC |
| | | | CCGATACCTTACCCGACCCCTTTAA |
| 159 | 40 | MAAP_aa | MRETTPTSSTTTRTPSFRRSSPTTHPSGETSERQSFRPRKGFSNLLAWLK |
| | | | RVLRRPLPESG* |
| 160 | 40 | MAAP_nt | ATGCGGGAGACAACCCCTACCTCAAGTACAACCACGCGGACGCCGAGTTT |
| | | | CAGGAGAAGCTCGCCGACGACACATCCTTCGGGGGAAACCTCGGAAAGGC |
| | | | AGTCTTTCAGGCCAAGAAAAGGGTTCTCGAACCTTTTGGCCTGGTTGAAG |
| | | | AGGGTGCTAAGACGGCCCCTACCGGAAAGCGGATAG |
| 161 | 41 | VP1_aa | MSFVDHPPDWLEEVGEGLREFLGLEAGPPKPKPNQQHQDQARGLVLPGYN |
| | | | YLGPGNGLDRGEPVNRADEVAREHDISYNEQLEAYGDNPYLKYNHADAEF |
| | | | QEKLADDTSFGGNLGKAVFQAKKRVLEPFGLVEEGAKTAPTGKRIDDHFP |
| | | | KRKKARTEEDSKPSTSSDAEAGPSGSQQLQIPAQPASSLGADTMSAGGGG |
| | | | PLGDNNQGADGVGNASGDWHCDSTWMGDRVVTKSTRTWVLPSYNNHQYRE |
| | | | IKSGSVDGSNANAYFGYSTPWGYFDFNRFHSHWSPRDWQRLINNYWGFRP |
| | | | RSLRVKIFNIQVKEVTVQDSTTTIANNLTSTVQVFTDDDYQLPYVVGNGT |
| | | | EGCLPAFPPQVFTLPQYGYATLNRDNTENPTERSSFFCLEYFPSKMLRTG |
| | | | NNFEFTYNFEEVPFHSSFAPSQNLFKLANPLVDQYLYRFVSTNNTGGVQF |
| | | | NKNLAGRYANTYKNWFPGPMGRTQGWNLGSGVNRASVSAFATTNRMELEG |
| | | | ASYQVPPQPNGMTNNLQGSNTYALENTMIFNSQPANPGTTATYLEGNMLI |
| | | | TSESETQPVNRVAYNVGGQMATNNQSSTTAPATGTYNLQEIVPGSVWMER |
| | | | DVYLQGPIWAKIPETGAHFHPSPAMGGFGLKHPPPMMLIKNTPVPGNITS |
| | | | FSDVPVSSFITQYSTGQVTVEMEWELKKENSKRWNPEIQYTNNYNDPQFV |
| | | | DFAPDSTGEYRTTRPIGTRYLTRPL* |
| 162 | 41 | VP1_nt | ATGTCTTTTGTTGATCACCCTCCAGATTGGTTGGAAGAAGTTGGTGAAGG |
| | | | TCTTCGCGAGTTTTTGGGCCTTGAAGCGGGCCCACCGAAACCAAAACCCA |
| | | | ATCAGCAGCATCAAGATCAAGCCCGTGGTCTTGTGCTGCCTGGTTATAAC |
| | | | TATCTCGGACCCGGAAACGGGCTCGATCGAGGAGAGCCTGTCAACAGGGC |
| | | | AGACGAGGTCGCGCGAGAGCACGACATCTCGTACAACGAGCAGCTTGAGG |
| | | | CGTATGGAGACAACCCCTACCTCAAGTACAACCACGCGGACGCCGAGTTT |
| | | | CAGGAGAAGCTCGCCGACGACACATCCTTCGGGGGAAACCTCGGAAAGGC |
| | | | AGTCTTTCAGGCCAAGAAAAGGGTTCTCGAACCTTTTGGCCTGGTTGAAG |
| | | | AGGGTGCTAAGACGGCCCCTACCGGAAAGCGGATAGACGACCACTTTCCA |
| | | | AAAAGAAAGAAGGCTCGGACCGAAGAGGACTCCAAGCCTTCCACCTCGTC |
| | | | AGACGCCGAAGCTGGACCCAGCGGATCCCAGCAGCTGCAAATCCCAGCCC |
| | | | AACCAGCCTCAAGTTTGGGAGCTGATACAATGTCTGCGGGAGGTGGCGGC |
| | | | CCATTGGGCGACAATAACCAAGGTGCCGATGGAGTGGGCAATGCCTCGGG |
| | | | AGATTGGCATTGCGATTCCACGTGGATGGGGGACAGAGTCGTCACCAAGT |
| | | | CCACCCGAACCTGGGTGCTGCCCAGCTACAACAACCACCAGTACCGAGAG |
| | | | ATCAAAAGCGGCTCCGTCGACGGAAGCAACGCCAACGCCTACTTTGGATA |
| | | | CAGCACCCCCTGGGGGTACTTTGACTTTAACCGCTTCCACAGCCACTGGA |
| | | | GCCCCCGAGACTGGCAAAGACTCATCAACAACTACTGGGGCTTCAGACCC |
| | | | CGGTCCCTCAGAGTCAAAATCTTCAACATTCAAGTCAAAGAGGTCACGGT |
| | | | GCAGGACTCCACCACCACCATCGCCAACAACCTCACCTCCACCGTCCAAG |
| | | | TGTTTACGGACGACGACTACCAGCTGCCCTACGTCGTCGGCAACGGGACC |
| | | | GAGGGATGCCTGCCGGCCTTCCCTCCGCAGGTCTTTACGCTGCCGCAGTA |
| | | | CGGTTACGCGACGCTGAACCGCGACAACACAGAAAATCCCACCGAGAGGA |
| | | | GCAGCTTCTTCTGCCTAGAGTACTTTCCCAGCAAGATGCTGAGAACGGGC |
| | | | AACAACTTTGAGTTTACCTACAACTTTGAGGAGGTGCCCTTCCACTCCAG |
| | | | CTTCGCTCCCAGTCAGAACCTGTTCAAGCTGGCCAACCCGCTGGTGGACC |
| | | | AGTACTTGTACCGCTTCGTGAGCACAAATAACACTGGCGGAGTCCAGTTC |
| | | | AACAAGAACCTGGCCGGGAGATACGCCAACACCTACAAAAACTGGTTCCC |
| | | | GGGGCCCATGGGCCGAACCCAGGGCTGGAACCTGGGCTCCGGGGTCAACC |
| | | | GCGCCAGTGTCAGCGCCTTCGCCACGACCAATAGGATGGAGCTCGAGGGC |
| | | | GCGAGTTACCAGGTGCCCCCGCAGCCGAACGGCATGACCAACAACCTCCA |
| | | | GGGCAGCAACACCTATGCCCTGGAGAACACTATGATCTTCAACAGCCAGC |
| | | | CGGCGAACCCGGGCACCACCGCCACGTACCTCGAGGGCAACATGCTCATC |
| | | | ACCAGCGAGAGCGAGACACAGCCGGTGAACCGCGTGGCGTACAACGTCGG |
| | | | CGGGCAGATGGCCACCAACAACCAGAGCTCCACCACTGCCCCCGCGACCG |
| | | | GCACGTACAACCTCCAGGAAATCGTGCCCGGCAGCGTGTGGATGGAGAGG |
| | | | GACGTGTACCTCCAAGGACCCATCTGGGCCAAGATCCCAGAGACAGGGGC |
| | | | GCACTTTCACCCCTCTCCGGCCATGGGCGGATTCGGACTCAAACACCCAC |
| | | | CGCCCATGATGCTCATCAAGAACACGCCTGTGCCCGGAAATATCACCAGC |
| | | | TTCTCGGACGTGCCCGTCAGCAGCTTCATCACCCAGTACAGCACCGGGCA |
| | | | GGTCACCGTGGAGATGGAGTGGGAGCTCAAGAAGGAAAACTCCAAGAGGT |
| | | | GGAACCCAGAGATCCAGTACACAAACAACTACAACGACCCCCAGTTTGTG |
| | | | GACTTTGCCCCGGACAGCACCGGGGAATACAGAACCACCAGACCTATCGG |
| | | | AACCCGATACCTTACCCGACCCCTTTAA |
| 163 | 41 | MAAP_aa | METTPTSSTTTRTPSFRRSSPTTHPSGETSERQSFRPRKGFSNLLAWLKR |
| | | | VLRRPLPESG* |
| 164 | 41 | MAAP_nt | ATGGAGACAACCCCTACCTCAAGTACAACCACGCGGACGCCGAGTTTCAG |
| | | | GAGAAGCTCGCCGACGACACATCCTTCGGGGGAAACCTCGGAAAGGCAGT |
| | | | CTTTCAGGCCAAGAAAAGGGTTCTCGAACCTTTTGGCCTGGTTGAAGAGG |
| | | | GTGCTAAGACGGCCCCTACCGGAAAGCGGATAG |
| 165 | 42 | VP1_aa | MSFVDHPPDWLEEVGEGLREFLGLEAGPPKPKPNQQHQDQARGLVLPGYV |
| | | | YLGPGNGLDRGEPVNRADEVAREHDISYNEQLEAGDNPYLKYNHADAEFQ |
| | | | EKLADDTSFGGNLGKAVFQAKKRVLEPFGLVEEGAKTAPTGKRIDDHFPK |
| | | | RKKARTEEDSKPSTSSDAEAGPSGSQQLQIPAQPASSLGADTMSAGGGGP |
| | | | LGDNNQGADGVGNASGDWHCDSTWMGDRVVTKSTRTWVLPSYNNHQYREI |
| | | | KSGSVDGSNANAYFGYSTPWGYFDFNRFHSHWSPRDWQRLINNYWGFRPR |
| | | | SLRVKIFNIQVKEVTVQDSTTTIANNLTSTVQVFTDDDYQLPYVVGNGTE |
| | | | GCLPAFPPQVFTLPQYGYATLNRDNTENPTERSSFFCLEYFPSKMLRTGN |
| | | | NFEFTYNFEEVPFHSSFAPSQNLFKLANPLVDQYLYRFVSTNNTGGVQFN |
| | | | KNLAGRYANTYKNWFPGPMGRTQGWNLGSGVNRASVSAFATTNRMELEGA |
| | | | SYQVPPQPNGMTNNLQGSNTYALENTMIFNSQPANPGTTATYLEGNMLIT |
| | | | SESETQPVNRVAYNVGGQMATNNQSSTTAPATGTYNLQEIVPGSVWMERD |
| | | | VYLQGPIWAKIPETGAHFHPSPAMGGFGLKHPPPMMLIKNTPVPGNITSF |
| | | | SDVPVSSFITQYSTGQVTVEMEWELKKENSKRWNPEIQYTNNYNDPQFVD |
| | | | FAPDSTGEYRTTRPIGTRYLTRPL* |
| 166 | 42 | VP1_nt | ATGTCTTTTGTTGATCACCCTCCAGATTGGTTGGAAGAAGTTGGTGAAGG |
| | | | TCTTCGCGAGTTTTTGGGCCTTGAAGCGGGCCCACCGAAACCAAAACCCA |
| | | | ATCAGCAGCATCAAGATCAAGCCCGTGGTCTTGTGCTGCCTGGTTATGTC |
| | | | TATCTCGGACCCGGAAACGGGCTCGATCGAGGAGAGCCTGTCAACAGGGC |
| | | | AGACGAGGTCGCGCGAGAGCACGACATCTCGTACAACGAGCAGCTTGAGG |
| | | | CGGGAGACAACCCCTACCTCAAGTACAACCACGCGGACGCCGAGTTTCAG |
| | | | GAGAAGCTCGCCGACGACACATCCTTCGGGGGAAACCTCGGAAAGGCAGT |
| | | | CTTTCAGGCCAAGAAAAGGGTTCTCGAACCTTTTGGCCTGGTTGAAGAGG |
| | | | GTGCTAAGACGGCCCCTACCGGAAAGCGGATAGACGACCACTTTCCAAAA |
| | | | AGAAAGAAGGCTCGGACCGAAGAGGACTCCAAGCCTTCCACCTCGTCAGA |
| | | | CGCCGAAGCTGGACCCAGCGGATCCCAGCAGCTGCAAATCCCAGCCCAAC |
| | | | CAGCCTCAAGTTTGGGAGCTGATACAATGTCTGCGGGAGGTGGCGGCCCA |
| | | | TTGGGCGACAATAACCAAGGTGCCGATGGAGTGGGCAATGCCTCGGGAGA |
| | | | TTGGCATTGCGATTCCACGTGGATGGGGGACAGAGTCGTCACCAAGTCCA |
| | | | CCCGAACCTGGGTGCTGCCCAGCTACAACAACCACCAGTACCGAGAGATC |
| | | | AAAAGCGGCTCCGTCGACGGAAGCAACGCCAACGCCTACTTTGGATACAG |
| | | | CACCCCCTGGGGGTACTTTGACTTTAACCGCTTCCACAGCCACTGGAGCC |
| | | | CCCGAGACTGGCAAAGACTCATCAACAACTACTGGGGCTTCAGACCCCGG |
| | | | TCCCTCAGAGTCAAAATCTTCAACATTCAAGTCAAAGAGGTCACGGTGCA |
| | | | GGACTCCACCACCACCATCGCCAACAACCTCACCTCCACCGTCCAAGTGT |
| | | | TTACGGACGACGACTACCAGCTGCCCTACGTCGTCGGCAACGGGACCGAG |
| | | | GGATGCCTGCCGGCCTTCCCTCCGCAGGTCTTTACGCTGCCGCAGTACGG |
| | | | TTACGCGACGCTGAACCGCGACAACACAGAAAATCCCACCGAGAGGAGCA |
| | | | GCTTCTTCTGCCTAGAGTACTTTCCCAGCAAGATGCTGAGAACGGGCAAC |
| | | | AACTTTGAGTTTACCTACAACTTTGAGGAGGTGCCCTTCCACTCCAGCTT |
| | | | CGCTCCCAGTCAGAACCTGTTCAAGCTGGCCAACCCGCTGGTGGACCAGT |
| | | | ACTTGTACCGCTTCGTGAGCACAAATAACACTGGCGGAGTCCAGTTCAAC |
| | | | AAGAACCTGGCCGGGAGATACGCCAACACCTACAAAAACTGGTTCCCGGG |
| | | | GCCCATGGGCCGAACCCAGGGCTGGAACCTGGGCTCCGGGGTCAACCGCG |
| | | | CCAGTGTCAGCGCCTTCGCCACGACCAATAGGATGGAGCTCGAGGGCGCG |
| | | | AGTTACCAGGTGCCCCCGCAGCCGAACGGCATGACCAACAACCTCCAGGG |
| | | | CAGCAACACCTATGCCCTGGAGAACACTATGATCTTCAACAGCCAGCCGG |
| | | | CGAACCCGGGCACCACCGCCACGTACCTCGAGGGCAACATGCTCATCACC |
| | | | AGCGAGAGCGAGACACAGCCGGTGAACCGCGTGGCGTACAACGTCGGCGG |
| | | | GCAGATGGCCACCAACAACCAGAGCTCCACCACTGCCCCCGCGACCGGCA |
| | | | CGTACAACCTCCAGGAAATCGTGCCCGGCAGCGTGTGGATGGAGAGGGAC |
| | | | GTGTACCTCCAAGGACCCATCTGGGCCAAGATCCCAGAGACAGGGGCGCA |
| | | | CTTTCACCCCTCTCCGGCCATGGGCGGATTCGGACTCAAACACCCACCGC |
| | | | CCATGATGCTCATCAAGAACACGCCTGTGCCCGGAAATATCACCAGCTTC |
| | | | TCGGACGTGCCCGTCAGCAGCTTCATCACCCAGTACAGCACCGGGCAGGT |
| | | | CACCGTGGAGATGGAGTGGGAGCTCAAGAAGGAAAACTCCAAGAGGTGGA |
| | | | ACCCAGAGATCCAGTACACAAACAACTACAACGACCCCCAGTTTGTGGAC |
| | | | TTTGCCCCGGACAGCACCGGGGAATACAGAACCACCAGACCTATCGGAAC |
| | | | CCGATACCTTACCCGACCCCTTTAA |
| 167 | 42 | MAAP_aa | MSISDPETGSIEESLSTGQTRSRESTTSRTTSSLRRETTPTSSTTTRTPS |
| | | | FRRSSPTTHPSGETSERQSFRPRKGFSNLLAWLKRVLRRPLPESG* |
| 168 | 42 | MAAP_nt | ATGTCTATCTCGGACCCGGAAACGGGCTCGATCGAGGAGAGCCTGTCAAC |
| | | | AGGGCAGACGAGGTCGCGCGAGAGCACGACATCTCGTACAACGAGCAGCT |
| | | | TGAGGCGGGAGACAACCCCTACCTCAAGTACAACCACGCGGACGCCGAGT |
| | | | TTCAGGAGAAGCTCGCCGACGACACATCCTTCGGGGGAAACCTCGGAAAG |
| | | | GCAGTCTTTCAGGCCAAGAAAAGGGTTCTCGAACCTTTTGGCCTGGTTGA |
| | | | AGAGGGTGCTAAGACGGCCCCTACCGGAAAGCGGATAG |
| 169 | 43 | VP1_aa | MSFVDHPPDWLEEVGEGLREFLGLHEAGPPKPKPNQQHQDQARGLVLPGY |
| | | | NYLGPGNGLDRGEPVNRADEVAREHDISYNEQLEAGDNPYLKYNHADAEF |
| | | | QEKLADDTSFGGNLGKAVFQAKKRVLEPFGLVEEGAKTAPTGKRIDDHFP |
| | | | KRKKARTEEDSKPSTSSDAEAGPSGSQQLQIPAQPASSLGADTMSAGGGG |
| | | | PLGDNNQGADGVGNASGDWHCDSTWMGDRVVTKSTRTWVLPSYNNHQYRE |
| | | | IKSGSVDGSNANAYFGYSTPWGYFDFNRFHSHWSPRDWQRLINNYWGFRP |
| | | | RSLRVKIFNIQVKEVTVQDSTTTIANNLTSTVQVFTDDDYQLPYVVGNGT |
| | | | EGCLPAFPPQVFTLPQYGYATLNRDNTENPTERSSFFCLEYFPSKMLRTG |
| | | | NNFEFTYNFEEVPFHSSFAPSQNLFKLANPLVDQYLYRFVSTNNTGGVQF |
| | | | NKNLAGRYANTYKNWFPGPMGRTQGWNLGSGVNRASVSAFATTNRMELEG |
| | | | ASYQVPPQPNGMTNNLQGSNTYALENTMIFNSQPANPGTTATYLEGNMLI |
| | | | TSESETQPVNRVAYNVGGQMATNNQSSTTAPATGTYNLQEIVPGSVWMER |
| | | | DVYLQGPIWAKIPETGAHFHPSPAMGGFGLKHPPPMMLIKNTPVPGNITS |
| | | | FSDVPVSSFITQYSTGQVTVEMEWELKKENSKRWNPEIQYTNNYNDPQFV |
| | | | DFAPDSTGEYRTTRPIGTRYLTRPL* |
| 170 | 43 | VP1_nt | ATGTCTTTTGTTGATCACCCTCCAGATTGGTTGGAAGAAGTTGGTGAAGG |
| | | | ACTTCGCGAGTTTTTGGGCCTTCATGAAGCGGGCCCACCGAAACCAAAAC |
| | | | CCAATCAGCAGCATCAAGATCAAGCCCGTGGTCTTGTGCTGCCTGGTTAT |
| | | | AACTATCTCGGACCCGGAAACGGGCTCGATCGAGGAGAGCCTGTCAACAG |
| | | | GGCAGACGAGGTCGCGCGAGAGCACGACATCTCGTACAACGAGCAGCTTG |
| | | | AGGCGGGAGACAACCCCTACCTCAAGTACAACCACGCGGACGCCGAGTTT |
| | | | CAGGAGAAGCTCGCCGACGACACATCCTTCGGGGGAAACCTCGGAAAGGC |
| | | | AGTCTTTCAGGCCAAGAAAAGGGTTCTCGAACCTTTTGGCCTGGTTGAAG |
| | | | AGGGTGCTAAGACGGCCCCTACCGGAAAGCGGATAGACGACCACTTTCCA |
| | | | AAAAGAAAGAAGGCTCGGACCGAAGAGGACTCCAAGCCTTCCACCTCGTC |
| | | | AGACGCCGAAGCTGGACCCAGCGGATCCCAGCAGCTGCAAATCCCAGCCC |
| | | | AACCAGCCTCAAGTTTGGGAGCTGATACAATGTCTGCGGGAGGTGGCGGC |
| | | | CCATTGGGCGACAATAACCAAGGTGCCGATGGAGTGGGCAATGCCTCGGG |
| | | | AGATTGGCATTGCGATTCCACGTGGATGGGGGACAGAGTCGTCACCAAGT |
| | | | CCACCCGAACCTGGGTGCTGCCCAGCTACAACAACCACCAGTACCGAGAG |
| | | | ATCAAAAGCGGCTCCGTCGACGGAAGCAACGCCAACGCCTACTTTGGATA |
| | | | CAGCACCCCCTGGGGGTACTTTGACTTTAACCGCTTCCACAGCCACTGGA |
| | | | GCCCCCGAGACTGGCAAAGACTCATCAACAACTACTGGGGCTTCAGACCC |
| | | | CGGTCCCTCAGAGTCAAAATCTTCAACATTCAAGTCAAAGAGGTCACGGT |
| | | | GCAGGACTCCACCACCACCATCGCCAACAACCTCACCTCCACCGTCCAAG |
| | | | TGTTTACGGACGACGACTACCAGCTGCCCTACGTCGTCGGCAACGGGACC |
| | | | GAGGGATGCCTGCCGGCCTTCCCTCCGCAGGTCTTTACGCTGCCGCAGTA |
| | | | CGGTTACGCGACGCTGAACCGCGACAACACAGAAAATCCCACCGAGAGGA |
| | | | GCAGCTTCTTCTGCCTAGAGTACTTTCCCAGCAAGATGCTGAGAACGGGC |
| | | | AACAACTTTGAGTTTACCTACAACTTTGAGGAGGTGCCCTTCCACTCCAG |
| | | | CTTCGCTCCCAGTCAGAACCTGTTCAAGCTGGCCAACCCGCTGGTGGACC |
| | | | AGTACTTGTACCGCTTCGTGAGCACAAATAACACTGGCGGAGTCCAGTTC |
| | | | AACAAGAACCTGGCCGGGAGATACGCCAACACCTACAAAAACTGGTTCCC |
| | | | GGGGCCCATGGGCCGAACCCAGGGCTGGAACCTGGGCTCCGGGGTCAACC |
| | | | GCGCCAGTGTCAGCGCCTTCGCCACGACCAATAGGATGGAGCTCGAGGGC |
| | | | GCGAGTTACCAGGTGCCCCCGCAGCCGAACGGCATGACCAACAACCTCCA |
| | | | GGGCAGCAACACCTATGCCCTGGAGAACACTATGATCTTCAACAGCCAGC |
| | | | CGGCGAACCCGGGCACCACCGCCACGTACCTCGAGGGCAACATGCTCATC |
| | | | ACCAGCGAGAGCGAGACACAGCCGGTGAACCGCGTGGCGTACAACGTCGG |
| | | | CGGGCAGATGGCCACCAACAACCAGAGCTCCACCACTGCCCCCGCGACCG |
| | | | GCACGTACAACCTCCAGGAAATCGTGCCCGGCAGCGTGTGGATGGAGAGG |
| | | | GACGTGTACCTCCAAGGACCCATCTGGGCCAAGATCCCAGAGACAGGGGC |
| | | | GCACTTTCACCCCTCTCCGGCCATGGGCGGATTCGGACTCAAACACCCAC |
| | | | CGCCCATGATGCTCATCAAGAACACGCCTGTGCCCGGAAATATCACCAGC |
| | | | TTCTCGGACGTGCCCGTCAGCAGCTTCATCACCCAGTACAGCACCGGGCA |
| | | | GGTCACCGTGGAGATGGAGTGGGAGCTCAAGAAGGAAAACTCCAAGAGGT |
| | | | GGAACCCAGAGATCCAGTACACAAACAACTACAACGACCCCCAGTTTGTG |
| | | | GACTTTGCCCCGGACAGCACCGGGGAATACAGAACCACCAGACCTATCGG |
| | | | AACCCGATACCTTACCCGACCCCTTTAA |
| 171 | 43 | MAAP_aa | MKRAHRNQNPISSIKIKPVVLCCLVITISDPETGSIEESLSTGQTRSRES |
| | | | TTSRTTSSLRRETTPTSSTTTRTPSFRRSSPTTHPSGETSERQSFRPRKG |
| | | | FSNLLAWLKRVLRRPLPESG* |
| 172 | 43 | MAAP_nt | ATGAAGCGGGCCCACCGAAACCAAAACCCAATCAGCAGCATCAAGATCAA |
| | | | GCCCGTGGTCTTGTGCTGCCTGGTTATAACTATCTCGGACCCGGAAACGG |
| | | | GCTCGATCGAGGAGAGCCTGTCAACAGGGCAGACGAGGTCGCGCGAGAGC |
| | | | ACGACATCTCGTACAACGAGCAGCTTGAGGCGGGAGACAACCCCTACCTC |
| | | | AAGTACAACCACGCGGACGCCGAGTTTCAGGAGAAGCTCGCCGACGACAC |
| | | | ATCCTTCGGGGGAAACCTCGGAAAGGCAGTCTTTCAGGCCAAGAAAAGGG |
| | | | TTCTCGAACCTTTTGGCCTGGTTGAAGAGGGTGCTAAGACGGCCCCTACC |
| | | | GGAAAGCGGATAG |
| 173 | 44 | VP1_aa | MSFVDHPPDWLEEVGEGLREFLGLEAGPPKPKPNEQHQDYARGLVLPGYN |
| | | | YLGPGNGLDRGEPVNRADEVAREHDISYNEQLEAGDNPYLKYNHADAEFQ |
| | | | EKLADDTSFGGNLGKAVFQAKKRVLEPFGLVEEGAKTAPTGKRIDDHFPK |
| | | | RKKARTEEDSKPSTSSDAEAGPSGSQQLQIPAQPASSLGADTMSAGGGGP |
| | | | LGDNNQGADGVGNASGDWHCDSTWMGDRVVTKSTRTWVLPSYNNHQYREI |
| | | | KSGSVDGSNANAYFGYSTPWGYFDFNRFHSHWSPRDWQRLINNYWGFRPR |
| | | | SLRVKIFNIQVKEVTVQDSTTTIANNLTSTVQVFTDDDYQLPYVVGNGTE |
| | | | GCLPAFPPQVFTLPQYGYATLNRDNTENPTERSSFFCLEYFPSKMLRTGN |
| | | | NFEFTYNFEEVPFHSSFAPSQNLFKLANPLVDQYLYRFVSTNNTGGVQFN |
| | | | KNLAGRYANTYKNWFPGPMGRTQGWNLGSGVNRASVSAFATTNRMELEGA |
| | | | SYQVPPQPNGMTNNLQGSNTYALENTMIFNSQPANPGTTATYLEGNMLIT |
| | | | SESETQPVNRVAYNVGGQMATNNQSSTTAPATGTYNLQEIVPGSVWMERD |
| | | | VYLQGPIWAKIPETGAHFHPSPAMGGFGLKHPPPMMLIKNTPVPGNITSF |
| | | | SDVPVSSFITQYSTGQVTVEMEWELKKENSKRWNPEIQYTNNYNDPQFVD |
| | | | FAPDSTGEYRTTRPIGTRYLTRPL* |
| 174 | 44 | VP1_nt | ATGTCTTTTGTTGATCACCCTCCAGATTGGTTGGAAGAAGTTGGTGAAGG |
| | | | TCTTCGCGAGTTTTTGGGCCTTGAAGCGGGCCCACCGAAACCAAAACCCA |
| | | | ATGAGCAGCATCAAGATTACGCCCGTGGTCTTGTGCTGCCTGGTTATAAC |
| | | | TATCTCGGACCCGGAAACGGGCTCGATCGAGGAGAGCCTGTCAACAGGGC |
| | | | AGACGAGGTCGCGCGAGAGCACGACATCTCGTACAACGAGCAGCTTGAGG |
| | | | CGGGAGACAACCCCTACCTCAAGTACAACCACGCGGACGCCGAGTTTCAG |
| | | | GAGAAGCTCGCCGACGACACATCCTTCGGGGGAAACCTCGGAAAGGCAGT |
| | | | CTTTCAGGCCAAGAAAAGGGTTCTCGAACCTTTTGGCCTGGTTGAAGAGG |
| | | | GTGCTAAGACGGCCCCTACCGGAAAGCGGATAGACGACCACTTTCCAAAA |
| | | | AGAAAGAAGGCTCGGACCGAAGAGGACTCCAAGCCTTCCACCTCGTCAGA |
| | | | CGCCGAAGCTGGACCCAGCGGATCCCAGCAGCTGCAAATCCCAGCCCAAC |
| | | | CAGCCTCAAGTTTGGGAGCTGATACAATGTCTGCGGGAGGTGGCGGCCCA |
| | | | TTGGGCGACAATAACCAAGGTGCCGATGGAGTGGGCAATGCCTCGGGAGA |
| | | | TTGGCATTGCGATTCCACGTGGATGGGGGACAGAGTCGTCACCAAGTCCA |
| | | | CCCGAACCTGGGTGCTGCCCAGCTACAACAACCACCAGTACCGAGAGATC |
| | | | AAAAGCGGCTCCGTCGACGGAAGCAACGCCAACGCCTACTTTGGATACAG |
| | | | CACCCCCTGGGGGTACTTTGACTTTAACCGCTTCCACAGCCACTGGAGCC |
| | | | CCCGAGACTGGCAAAGACTCATCAACAACTACTGGGGCTTCAGACCCCGG |
| | | | TCCCTCAGAGTCAAAATCTTCAACATTCAAGTCAAAGAGGTCACGGTGCA |
| | | | GGACTCCACCACCACCATCGCCAACAACCTCACCTCCACCGTCCAAGTGT |
| | | | TTACGGACGACGACTACCAGCTGCCCTACGTCGTCGGCAACGGGACCGAG |
| | | | GGATGCCTGCCGGCCTTCCCTCCGCAGGTCTTTACGCTGCCGCAGTACGG |
| | | | TTACGCGACGCTGAACCGCGACAACACAGAAAATCCCACCGAGAGGAGCA |
| | | | GCTTCTTCTGCCTAGAGTACTTTCCCAGCAAGATGCTGAGAACGGGCAAC |
| | | | AACTTTGAGTTTACCTACAACTTTGAGGAGGTGCCCTTCCACTCCAGCTT |
| | | | CGCTCCCAGTCAGAACCTGTTCAAGCTGGCCAACCCGCTGGTGGACCAGT |
| | | | ACTTGTACCGCTTCGTGAGCACAAATAACACTGGCGGAGTCCAGTTCAAC |
| | | | AAGAACCTGGCCGGGAGATACGCCAACACCTACAAAAACTGGTTCCCGGG |
| | | | GCCCATGGGCCGAACCCAGGGCTGGAACCTGGGCTCCGGGGTCAACCGCG |
| | | | CCAGTGTCAGCGCCTTCGCCACGACCAATAGGATGGAGCTCGAGGGCGCG |
| | | | AGTTACCAGGTGCCCCCGCAGCCGAACGGCATGACCAACAACCTCCAGGG |
| | | | CAGCAACACCTATGCCCTGGAGAACACTATGATCTTCAACAGCCAGCCGG |
| | | | CGAACCCGGGCACCACCGCCACGTACCTCGAGGGCAACATGCTCATCACC |
| | | | AGCGAGAGCGAGACACAGCCGGTGAACCGCGTGGCGTACAACGTCGGCGG |
| | | | GCAGATGGCCACCAACAACCAGAGCTCCACCACTGCCCCCGCGACCGGCA |
| | | | CGTACAACCTCCAGGAAATCGTGCCCGGCAGCGTGTGGATGGAGAGGGAC |
| | | | GTGTACCTCCAAGGACCCATCTGGGCCAAGATCCCAGAGACAGGGGCGCA |
| | | | CTTTCACCCCTCTCCGGCCATGGGCGGATTCGGACTCAAACACCCACCGC |
| | | | CCATGATGCTCATCAAGAACACGCCTGTGCCCGGAAATATCACCAGCTTC |
| | | | TCGGACGTGCCCGTCAGCAGCTTCATCACCCAGTACAGCACCGGGCAGGT |
| | | | CACCGTGGAGATGGAGTGGGAGCTCAAGAAGGAAAACTCCAAGAGGTGGA |
| | | | ACCCAGAGATCCAGTACACAAACAACTACAACGACCCCCAGTTTGTGGAC |
| | | | TTTGCCCCGGACAGCACCGGGGAATACAGAACCACCAGACCTATCGGAAC |
| | | | CCGATACCTTACCCGACCCCTTTAA |
| 175 | 44 | MAAP_aa | MSSIKITPVVLCCLVITISDPETGSIEESLSTGQTRSRESTTSRTTSSLR |
| | | | RETTPTSSTTTRTPSFRRSSPTTHPSGETSERQSFRPRKGFSNLLAWLKR |
| | | | VLRRPLPESG* |
| 176 | 44 | MAAP_nt | ATGAGCAGCATCAAGATTACGCCCGTGGTCTTGTGCTGCCTGGTTATAAC |
| | | | TATCTCGGACCCGGAAACGGGCTCGATCGAGGAGAGCCTGTCAACAGGGC |
| | | | AGACGAGGTCGCGCGAGAGCACGACATCTCGTACAACGAGCAGCTTGAGG |
| | | | CGGGAGACAACCCCTACCTCAAGTACAACCACGCGGACGCCGAGTTTCAG |
| | | | GAGAAGCTCGCCGACGACACATCCTTCGGGGGAAACCTCGGAAAGGCAGT |
| | | | CTTTCAGGCCAAGAAAAGGGTTCTCGAACCTTTTGGCCTGGTTGAAGAGG |
| | | | GTGCTAAGACGGCCCCTACCGGAAAGCGGATAG |
| 177 | 45 | VP1_aa | MSFVDHPPDWLEEVGEGLREFLGLEAGPPKPKPNGQHQDQARGLVLPGYN |
| | | | YLGPGNGLDRGEPVNRADEVAREHDISYNEQLEAGDNPYLKYNHADAEFQ |
| | | | EKLADDTSFGGNLGKAVFQAKKRVLEPFGLVEEGAKTAPTGKRIDDHFPK |
| | | | RKKARTEEDSKPSTSSDAEAGPSGSQQLQIPAQPASSLGADTMSAGGGGP |
| | | | LGDNNQGADGVGNASGDWHCDSTWMGDRVVTKSTRTWVLPSYNNHQYREI |
| | | | KSGSVDGSNANAYFGYSTPWGYFDFNRFHSHWSPRDWQRLINNYWGFRPR |
| | | | SLRVKIFNIQVKEVTVQDSTTTIANNLTSTVQVFTDDDYQLPYVVGNGTE |
| | | | GCLPAFPPQVFTLPQYGYATLNRDNTENPTERSSFFCLEYFPSKMLRTGN |
| | | | NFEFTYNFEEVPFHSSFAPSQNLFKLANPLVDQYLYRFVSTNNTGGVQFN |
| | | | KNLAGRYANTYKNWFPGPMGRTQGWNLGSGVNRASVSAFATTNRMELEGA |
| | | | SYQVPPQPNGMTNNLQGSNTYALENTMIFNSQPANPGTTATYLEGNMLIT |
| | | | SESETQPVNRVAYNVGGQMATNNQSSTTAPATGTYNLQEIVPGSVWMERD |
| | | | VYLQGPIWAKIPETGAHFHPSPAMGGFGLKHPPPMMLIKNTPVPGNITSF |
| | | | SDVPVSSFITQYSTGQVTVEMEWELKKENSKRWNPEIQYTNNYNDPQFVD |
| | | | FAPDSTGEYRTTRPIGTRYLTRPL* |
| 178 | 45 | VP1_nt | ATGTCTTTTGTTGATCACCCTCCAGATTGGTTGGAAGAAGTTGGTGAAGG |
| | | | TCTTCGCGAGTTTTTGGGCCTTGAAGCGGGCCCACCGAAACCAAAACCCA |
| | | | ATGGACAGCATCAAGATCAAGCCCGTGGTCTTGTGCTGCCTGGTTATAAC |
| | | | TATCTCGGACCCGGAAACGGGCTCGATCGAGGAGAGCCTGTCAACAGGGC |
| | | | AGACGAGGTCGCGCGAGAGCACGACATCTCGTACAACGAGCAGCTTGAGG |
| | | | CGGGAGACAACCCCTACCTCAAGTACAACCACGCGGACGCCGAGTTTCAG |
| | | | GAGAAGCTCGCCGACGACACATCCTTCGGGGGAAACCTCGGAAAGGCAGT |
| | | | CTTTCAGGCCAAGAAAAGGGTTCTCGAACCTTTTGGCCTGGTTGAAGAGG |
| | | | GTGCTAAGACGGCCCCTACCGGAAAGCGGATAGACGACCACTTTCCAAAA |
| | | | AGAAAGAAGGCTCGGACCGAAGAGGACTCCAAGCCTTCCACCTCGTCAGA |
| | | | CGCCGAAGCTGGACCCAGCGGATCCCAGCAGCTGCAAATCCCAGCCCAAC |
| | | | CAGCCTCAAGTTTGGGAGCTGATACAATGTCTGCGGGAGGTGGCGGCCCA |
| | | | TTGGGCGACAATAACCAAGGTGCCGATGGAGTGGGCAATGCCTCGGGAGA |
| | | | TTGGCATTGCGATTCCACGTGGATGGGGGACAGAGTCGTCACCAAGTCCA |
| | | | CCCGAACCTGGGTGCTGCCCAGCTACAACAACCACCAGTACCGAGAGATC |
| | | | AAAAGCGGCTCCGTCGACGGAAGCAACGCCAACGCCTACTTTGGATACAG |
| | | | CACCCCCTGGGGGTACTTTGACTTTAACCGCTTCCACAGCCACTGGAGCC |
| | | | CCCGAGACTGGCAAAGACTCATCAACAACTACTGGGGCTTCAGACCCCGG |
| | | | TCCCTCAGAGTCAAAATCTTCAACATTCAAGTCAAAGAGGTCACGGTGCA |
| | | | GGACTCCACCACCACCATCGCCAACAACCTCACCTCCACCGTCCAAGTGT |
| | | | TTACGGACGACGACTACCAGCTGCCCTACGTCGTCGGCAACGGGACCGAG |
| | | | GGATGCCTGCCGGCCTTCCCTCCGCAGGTCTTTACGCTGCCGCAGTACGG |
| | | | TTACGCGACGCTGAACCGCGACAACACAGAAAATCCCACCGAGAGGAGCA |
| | | | GCTTCTTCTGCCTAGAGTACTTTCCCAGCAAGATGCTGAGAACGGGCAAC |
| | | | AACTTTGAGTTTACCTACAACTTTGAGGAGGTGCCCTTCCACTCCAGCTT |
| | | | CGCTCCCAGTCAGAACCTGTTCAAGCTGGCCAACCCGCTGGTGGACCAGT |
| | | | ACTTGTACCGCTTCGTGAGCACAAATAACACTGGCGGAGTCCAGTTCAAC |
| | | | AAGAACCTGGCCGGGAGATACGCCAACACCTACAAAAACTGGTTCCCGGG |
| | | | GCCCATGGGCCGAACCCAGGGCTGGAACCTGGGCTCCGGGGTCAACCGCG |
| | | | CCAGTGTCAGCGCCTTCGCCACGACCAATAGGATGGAGCTCGAGGGCGCG |
| | | | AGTTACCAGGTGCCCCCGCAGCCGAACGGCATGACCAACAACCTCCAGGG |
| | | | CAGCAACACCTATGCCCTGGAGAACACTATGATCTTCAACAGCCAGCCGG |
| | | | CGAACCCGGGCACCACCGCCACGTACCTCGAGGGCAACATGCTCATCACC |
| | | | AGCGAGAGCGAGACACAGCCGGTGAACCGCGTGGCGTACAACGTCGGCGG |
| | | | GCAGATGGCCACCAACAACCAGAGCTCCACCACTGCCCCCGCGACCGGCA |
| | | | CGTACAACCTCCAGGAAATCGTGCCCGGCAGCGTGTGGATGGAGAGGGAC |
| | | | GTGTACCTCCAAGGACCCATCTGGGCCAAGATCCCAGAGACAGGGGCGCA |
| | | | CTTTCACCCCTCTCCGGCCATGGGCGGATTCGGACTCAAACACCCACCGC |
| | | | CCATGATGCTCATCAAGAACACGCCTGTGCCCGGAAATATCACCAGCTTC |
| | | | TCGGACGTGCCCGTCAGCAGCTTCATCACCCAGTACAGCACCGGGCAGGT |
| | | | CACCGTGGAGATGGAGTGGGAGCTCAAGAAGGAAAACTCCAAGAGGTGGA |
| | | | ACCCAGAGATCCAGTACACAAACAACTACAACGACCCCCAGTTTGTGGAC |
| | | | TTTGCCCCGGACAGCACCGGGGAATACAGAACCACCAGACCTATCGGAAC |
| | | | CCGATACCTTACCCGACCCCTTTAA |
| 179 | 45 | MAAP_aa | MDSIKIKPVVLCCLVITISDPETGSIEESLSTGQTRSRESTTSRTTSSLR |
| | | | RETTPTSSTTTRTPSFRRSSPTTHPSGETSERQSFRPRKGFSNLLAWLKR |
| | | | VLRRPLPESG* |
| 180 | 45 | MAAP_nt | ATGGACAGCATCAAGATCAAGCCCGTGGTCTTGTGCTGCCTGGTTATAAC |
| | | | TATCTCGGACCCGGAAACGGGCTCGATCGAGGAGAGCCTGTCAACAGGGC |
| | | | AGACGAGGTCGCGCGAGAGCACGACATCTCGTACAACGAGCAGCTTGAGG |
| | | | CGGGAGACAACCCCTACCTCAAGTACAACCACGCGGACGCCGAGTTTCAG |
| | | | GAGAAGCTCGCCGACGACACATCCTTCGGGGGAAACCTCGGAAAGGCAGT |
| | | | CTTTCAGGCCAAGAAAAGGGTTCTCGAACCTTTTGGCCTGGTTGAAGAGG |
| | | | GTGCTAAGACGGCCCCTACCGGAAAGCGGATAG |
| 181 | 46 | VP1_aa | MSFVDHPPDWLEEVGEGLREFLGLEAGPPKPKPVQQHWDQARGLVLPGYE |
| | | | YLGPGNGLDRGEPVNRADEVAREHDISYNEQLEAGDNPYLKYNHADAEFQ |
| | | | EKLADDTSFGGNLGKAVFQAKKRVLEPFGLVEEGAKTAPTGKRIDDHFPK |
| | | | RKKARTEEDSKPSTSSDAEAGPSGSQQLQIPAQPASSLGADTMSAGGGGP |
| | | | LGDNNQGADGVGNASGDWHCDSTWMGDRVVTKSTRTWVLPSYNNHQYREI |
| | | | KSGSVDGSNANAYFGYSTPWGYFDFNRFHSHWSPRDWQRLINNYWGFRPR |
| | | | SLRVKIFNIQVKEVTVQDSTTTIANNLTSTVQVFTDDDYQLPYVVGNGTE |
| | | | GCLPAFPPQVFTLPQYGYATLNRDNTENPTERSSFFCLEYFPSKMLRTGN |
| | | | NFEFTYNFEEVPFHSSFAPSQNLFKLANPLVDQYLYRFVSTNNTGGVQFN |
| | | | KNLAGRYANTYKNWFPGPMGRTQGWNLGSGVNRASVSAFATTNRMELEGA |
| | | | SYQVPPQPNGMTNNLQGSNTYALENTMIFNSQPANPGTTATYLEGNMLIT |
| | | | SESETQPVNRVAYNVGGQMATNNQSSTTAPATGTYNLQEIVPGSVWMERD |
| | | | VYLQGPIWAKIPETGAHFHPSPAMGGFGLKHPPPMMLIKNTPVPGNITSF |
| | | | SDVPVSSFITQYSTGQVTVEMEWELKKENSKRWNPEIQYTNNYNDPQFVD |
| | | | FAPDSTGEYRTTRPIGTRYLTRPL* |
| 182 | 46 | VP1_nt | ATGTCTTTTGTTGATCACCCTCCAGATTGGTTGGAAGAAGTTGGTGAAGG |
| | | | TCTTCGCGAGTTTTTGGGCCTTGAAGCGGGCCCACCGAAACCAAAACCCG |
| | | | TCCAGCAGCATTGGGATCAAGCCCGTGGTCTTGTGCTGCCTGGTTATGAG |
| | | | TATCTCGGACCCGGAAACGGGCTCGATCGAGGAGAGCCTGTCAACAGGGC |
| | | | AGACGAGGTCGCGCGAGAGCACGACATCTCGTACAACGAGCAGCTTGAGG |
| | | | CGGGAGACAACCCCTACCTCAAGTACAACCACGCGGACGCCGAGTTTCAG |
| | | | GAGAAGCTCGCCGACGACACATCCTTCGGGGGAAACCTCGGAAAGGCAGT |
| | | | CTTTCAGGCCAAGAAAAGGGTTCTCGAACCTTTTGGCCTGGTTGAAGAGG |
| | | | GTGCTAAGACGGCCCCTACCGGAAAGCGGATAGACGACCACTTTCCAAAA |
| | | | AGAAAGAAGGCTCGGACCGAAGAGGACTCCAAGCCTTCCACCTCGTCAGA |
| | | | CGCCGAAGCTGGACCCAGCGGATCCCAGCAGCTGCAAATCCCAGCCCAAC |
| | | | CAGCCTCAAGTTTGGGAGCTGATACAATGTCTGCGGGAGGTGGCGGCCCA |
| | | | TTGGGCGACAATAACCAAGGTGCCGATGGAGTGGGCAATGCCTCGGGAGA |
| | | | TTGGCATTGCGATTCCACGTGGATGGGGGACAGAGTCGTCACCAAGTCCA |
| | | | CCCGAACCTGGGTGCTGCCCAGCTACAACAACCACCAGTACCGAGAGATC |
| | | | AAAAGCGGCTCCGTCGACGGAAGCAACGCCAACGCCTACTTTGGATACAG |
| | | | CACCCCCTGGGGGTACTTTGACTTTAACCGCTTCCACAGCCACTGGAGCC |
| | | | CCCGAGACTGGCAAAGACTCATCAACAACTACTGGGGCTTCAGACCCCGG |
| | | | TCCCTCAGAGTCAAAATCTTCAACATTCAAGTCAAAGAGGTCACGGTGCA |
| | | | GGACTCCACCACCACCATCGCCAACAACCTCACCTCCACCGTCCAAGTGT |
| | | | TTACGGACGACGACTACCAGCTGCCCTACGTCGTCGGCAACGGGACCGAG |
| | | | GGATGCCTGCCGGCCTTCCCTCCGCAGGTCTTTACGCTGCCGCAGTACGG |
| | | | TTACGCGACGCTGAACCGCGACAACACAGAAAATCCCACCGAGAGGAGCA |
| | | | GCTTCTTCTGCCTAGAGTACTTTCCCAGCAAGATGCTGAGAACGGGCAAC |
| | | | AACTTTGAGTTTACCTACAACTTTGAGGAGGTGCCCTTCCACTCCAGCTT |
| | | | CGCTCCCAGTCAGAACCTGTTCAAGCTGGCCAACCCGCTGGTGGACCAGT |
| | | | ACTTGTACCGCTTCGTGAGCACAAATAACACTGGCGGAGTCCAGTTCAAC |
| | | | AAGAACCTGGCCGGGAGATACGCCAACACCTACAAAAACTGGTTCCCGGG |
| | | | GCCCATGGGCCGAACCCAGGGCTGGAACCTGGGCTCCGGGGTCAACCGCG |
| | | | CCAGTGTCAGCGCCTTCGCCACGACCAATAGGATGGAGCTCGAGGGCGCG |
| | | | AGTTACCAGGTGCCCCCGCAGCCGAACGGCATGACCAACAACCTCCAGGG |
| | | | CAGCAACACCTATGCCCTGGAGAACACTATGATCTTCAACAGCCAGCCGG |
| | | | CGAACCCGGGCACCACCGCCACGTACCTCGAGGGCAACATGCTCATCACC |
| | | | AGCGAGAGCGAGACACAGCCGGTGAACCGCGTGGCGTACAACGTCGGCGG |
| | | | GCAGATGGCCACCAACAACCAGAGCTCCACCACTGCCCCCGCGACCGGCA |
| | | | CGTACAACCTCCAGGAAATCGTGCCCGGCAGCGTGTGGATGGAGAGGGAC |
| | | | GTGTACCTCCAAGGACCCATCTGGGCCAAGATCCCAGAGACAGGGGCGCA |
| | | | CTTTCACCCCTCTCCGGCCATGGGCGGATTCGGACTCAAACACCCACCGC |
| | | | CCATGATGCTCATCAAGAACACGCCTGTGCCCGGAAATATCACCAGCTTC |
| | | | TCGGACGTGCCCGTCAGCAGCTTCATCACCCAGTACAGCACCGGGCAGGT |
| | | | CACCGTGGAGATGGAGTGGGAGCTCAAGAAGGAAAACTCCAAGAGGTGGA |
| | | | ACCCAGAGATCCAGTACACAAACAACTACAACGACCCCCAGTTTGTGGAC |
| | | | TTTGCCCCGGACAGCACCGGGGAATACAGAACCACCAGACCTATCGGAAC |
| | | | CCGATACCTTACCCGACCCCTTTAA |
| 183 | 46 | MAAP_aa | MSISDPETGSIEESLSTGQTRSRESTTSRTTSSLRRETTPTSSTTTRTPS |
| | | | FRRSSPTTHPSGETSERQSFRPRKGFSNLLAWLKRVLRRPLPESG* |
| 184 | 46 | MAAP_nt | ATGAGTATCTCGGACCCGGAAACGGGCTCGATCGAGGAGAGCCTGTCAAC |
| | | | AGGGCAGACGAGGTCGCGCGAGAGCACGACATCTCGTACAACGAGCAGCT |
| | | | TGAGGCGGGAGACAACCCCTACCTCAAGTACAACCACGCGGACGCCGAGT |
| | | | TTCAGGAGAAGCTCGCCGACGACACATCCTTCGGGGGAAACCTCGGAAAG |
| | | | GCAGTCTTTCAGGCCAAGAAAAGGGTTCTCGAACCTTTTGGCCTGGTTGA |
| | | | AGAGGGTGCTAAGACGGCCCCTACCGGAAAGCGGATAG |
| 185 | 47 | VP1_aa | MSFVDHPPDWLEEVGEGLREFLGLEAGPPKPKPNQQISEHSPGSRGLVLP |
| | | | GYRYLGPGNGLDRGEPVNRADEVAREHDISYNEQLEAGDNPYLKYNHADA |
| | | | EFQEKLADDTSFGGNLGKAVFQAKKRVLEPFGLVEEGAKTAPTGKRIDDH |
| | | | FPKRKKARTEEDSKPSTSSDAEAGPSGSQQLQIPAQPASSLGADTMSAGG |
| | | | GGPLGDNNQGADGVGNASGDWHCDSTWMGDRVVTKSTRTWVLPSYNNHQY |
| | | | REIKSGSVDGSNANAYFGYSTPWGYFDFNRFHSHWSPRDWQRLINNYWGF |
| | | | RPRSLRVKIFNIQVKEVTVQDSTTTIANNLTSTVQVFTDDDYQLPYVVGN |
| | | | GTEGCLPAFPPQVFTLPQYGYATLNRDNTENPTERSSFFCLEYFPSKMLR |
| | | | TGNNFEFTYNFEEVPFHSSFAPSQNLFKLANPLVDQYLYRFVSTNNTGGV |
| | | | QFNKNLAGRYANTYKNWFPGPMGRTQGWNLGSGVNRASVSAFATTNRMEL |
| | | | EGASYQVPPQPNGMTNNLQGSNTYALENTMIFNSQPANPGTTATYLEGNM |
| | | | LITSESETQPVNRVAYNVGGQMATNNQSSTTAPATGTYNLQEIVPGSVWM |
| | | | ERDVYLQGPIWAKIPETGAHFHPSPAMGGFGLKHPPPMMLIKNTPVPGNI |
| | | | TSFSDVPVSSFITQYSTGQVTVEMEWELKKENSKRWNPEIQYTNNYNDPQ |
| | | | FVDFAPDSTGEYRTTRPIGTRYLTRPL* |
| 186 | 47 | VP1_nt | ATGTCTTTTGTTGATCACCCTCCAGATTGGTTGGAAGAAGTTGGTGAAGG |
| | | | TCTTCGCGAGTTTTTGGGCCTTGAAGCGGGCCCACCGAAACCAAAACCCA |
| | | | ATCAGCAGATCTCGGAACATAGTCCTGGCAGTCGTGGTCTTGTGCTGCCT |
| | | | GGTTATAGGTATCTCGGACCCGGAAACGGGCTCGATCGAGGAGAGCCTGT |
| | | | CAACAGGGCAGACGAGGTCGCGCGAGAGCACGACATCTCGTACAACGAGC |
| | | | AGCTTGAGGCGGGAGACAACCCCTACCTCAAGTACAACCACGCGGACGCC |
| | | | GAGTTTCAGGAGAAGCTCGCCGACGACACATCCTTCGGGGGAAACCTCGG |
| | | | AAAGGCAGTCTTTCAGGCCAAGAAAAGGGTTCTCGAACCTTTTGGCCTGG |
| | | | TTGAAGAGGGTGCTAAGACGGCCCCTACCGGAAAGCGGATAGACGACCAC |
| | | | TTTCCAAAAAGAAAGAAGGCTCGGACCGAAGAGGACTCCAAGCCTTCCAC |
| | | | CTCGTCAGACGCCGAAGCTGGACCCAGCGGATCCCAGCAGCTGCAAATCC |
| | | | CAGCCCAACCAGCCTCAAGTTTGGGAGCTGATACAATGTCTGCGGGAGGT |
| | | | GGCGGCCCATTGGGCGACAATAACCAAGGTGCCGATGGAGTGGGCAATGC |
| | | | CTCGGGAGATTGGCATTGCGATTCCACGTGGATGGGGGACAGAGTCGTCA |
| | | | CCAAGTCCACCCGAACCTGGGTGCTGCCCAGCTACAACAACCACCAGTAC |
| | | | CGAGAGATCAAAAGCGGCTCCGTCGACGGAAGCAACGCCAACGCCTACTT |
| | | | TGGATACAGCACCCCCTGGGGGTACTTTGACTTTAACCGCTTCCACAGCC |
| | | | ACTGGAGCCCCCGAGACTGGCAAAGACTCATCAACAACTACTGGGGCTTC |
| | | | AGACCCCGGTCCCTCAGAGTCAAAATCTTCAACATTCAAGTCAAAGAGGT |
| | | | CACGGTGCAGGACTCCACCACCACCATCGCCAACAACCTCACCTCCACCG |
| | | | TCCAAGTGTTTACGGACGACGACTACCAGCTGCCCTACGTCGTCGGCAAC |
| | | | GGGACCGAGGGATGCCTGCCGGCCTTCCCTCCGCAGGTCTTTACGCTGCC |
| | | | GCAGTACGGTTACGCGACGCTGAACCGCGACAACACAGAAAATCCCACCG |
| | | | AGAGGAGCAGCTTCTTCTGCCTAGAGTACTTTCCCAGCAAGATGCTGAGA |
| | | | ACGGGCAACAACTTTGAGTTTACCTACAACTTTGAGGAGGTGCCCTTCCA |
| | | | CTCCAGCTTCGCTCCCAGTCAGAACCTGTTCAAGCTGGCCAACCCGCTGG |
| | | | TGGACCAGTACTTGTACCGCTTCGTGAGCACAAATAACACTGGCGGAGTC |
| | | | CAGTTCAACAAGAACCTGGCCGGGAGATACGCCAACACCTACAAAAACTG |
| | | | GTTCCCGGGGCCCATGGGCCGAACCCAGGGCTGGAACCTGGGCTCCGGGG |
| | | | TCAACCGCGCCAGTGTCAGCGCCTTCGCCACGACCAATAGGATGGAGCTC |
| | | | GAGGGCGCGAGTTACCAGGTGCCCCCGCAGCCGAACGGCATGACCAACAA |
| | | | CCTCCAGGGCAGCAACACCTATGCCCTGGAGAACACTATGATCTTCAACA |
| | | | GCCAGCCGGCGAACCCGGGCACCACCGCCACGTACCTCGAGGGCAACATG |
| | | | CTCATCACCAGCGAGAGCGAGACACAGCCGGTGAACCGCGTGGCGTACAA |
| | | | CGTCGGCGGGCAGATGGCCACCAACAACCAGAGCTCCACCACTGCCCCCG |
| | | | CGACCGGCACGTACAACCTCCAGGAAATCGTGCCCGGCAGCGTGTGGATG |
| | | | GAGAGGGACGTGTACCTCCAAGGACCCATCTGGGCCAAGATCCCAGAGAC |
| | | | AGGGGCGCACTTTCACCCCTCTCCGGCCATGGGCGGATTCGGACTCAAAC |
| | | | ACCCACCGCCCATGATGCTCATCAAGAACACGCCTGTGCCCGGAAATATC |
| | | | ACCAGCTTCTCGGACGTGCCCGTCAGCAGCTTCATCACCCAGTACAGCAC |
| | | | CGGGCAGGTCACCGTGGAGATGGAGTGGGAGCTCAAGAAGGAAAACTCCA |
| | | | AGAGGTGGAACCCAGAGATCCAGTACACAAACAACTACAACGACCCCCAG |
| | | | TTTGTGGACTTTGCCCCGGACAGCACCGGGGAATACAGAACCACCAGACC |
| | | | TATCGGAACCCGATACCTTACCCGACCCCTTTAA |
| 187 | 47 | MAAP_aa | LAVVVLCCLVIGISDPETGSIEESLSTGQTRSRESTTSRTTSSLRRETTP |
| | | | TSSTTTRTPSFRRSSPTTHPSGETSERQSFRPRKGFSNLLAWLKRVLRRP |
| | | | LPESG* |
| 188 | 47 | MAAP_nt | CTGGCAGTCGTGGTCTTGTGCTGCCTGGTTATAGGTATCTCGGACCCGGA |
| | | | AACGGGCTCGATCGAGGAGAGCCTGTCAACAGGGCAGACGAGGTCGCGCG |
| | | | AGAGCACGACATCTCGTACAACGAGCAGCTTGAGGCGGGAGACAACCCCT |
| | | | ACCTCAAGTACAACCACGCGGACGCCGAGTTTCAGGAGAAGCTCGCCGAC |
| | | | GACACATCCTTCGGGGGAAACCTCGGAAAGGCAGTCTTTCAGGCCAAGAA |
| | | | AAGGGTTCTCGAACCTTTTGGCCTGGTTGAAGAGGGTGCTAAGACGGCCC |
| | | | CTACCGGAAAGCGGATAG |
| 189 | 48 | VP1_aa | MSFVDHPPDWLEEVGEGLREFLGLEAGPPKPKPNDQHQDQARGLVLPGYN |
| | | | YLGPGNGLDRGEPVNRADEVAREHDISYNEQLEAGDNPYLKYNHADAEFQ |
| | | | EKLADDTSFGGNLGKAVFQAKKRVLEPFGLVEEGAKTAPTGKRIDDHFPK |
| | | | RKKARTEEDSKPSTSSDAEAGPSGSQQLQIPAQPASSLGADTMSAGGGGP |
| | | | LGDNNQGADGVGNASGDWHCDSTWMGDRVVTKSTRTWVLPSYNNHQYREI |
| | | | KSGSVDGSNANAYFGYSTPWGYFDFNRFHSHWSPRDWQRLINNYWGFRPR |
| | | | SLRVKIFNIQVKEVTVQDSTTTIANNLTSTVQVFTDDDYQLPYVVGNGTE |
| | | | GCLPAFPPQVFTLPQYGYATLNRDNTENPTERSSFFCLEYFPSKMLRTGN |
| | | | NFEFTYNFEEVPFHSSFAPSQNLFKLANPLVDQYLYRFVSTNNTGGVQFN |
| | | | KNLAGRYANTYKNWFPGPMGRTQGWNLGSGVNRASVSAFATTNRMELEGA |
| | | | SYQVPPQPNGMTNNLQGSNTYALENTMIFNSQPANPGTTATYLEGNMLIT |
| | | | SESETQPVNRVAYNVGGQMATNNQSSTTAPATGTYNLQEIVPGSVWMERD |
| | | | VYLQGPIWAKIPETGAHFHPSPAMGGFGLKHPPPMMLIKNTPVPGNITSF |
| | | | SDVPVSSFITQYSTGQVTVEMEWELKKENSKRWNPEIQYTNNYNDPQFVD |
| | | | FAPDSTGEYRTTRPIGTRYLTRPL* |
| 190 | 48 | VP1_nt | ATGTCTTTTGTTGATCACCCTCCAGATTGGTTGGAAGAAGTTGGTGAAGG |
| | | | TCTTCGCGAGTTTTTGGGCCTTGAAGCGGGCCCACCGAAACCAAAACCCA |
| | | | ATGATCAGCATCAAGATCAAGCCCGTGGTCTTGTGCTGCCTGGTTATAAC |
| | | | TATCTCGGACCCGGAAACGGGCTCGATCGAGGAGAGCCTGTCAACAGGGC |
| | | | AGACGAGGTCGCGCGAGAGCACGACATCTCGTACAACGAGCAGCTTGAGG |
| | | | CGGGAGACAACCCCTACCTCAAGTACAACCACGCGGACGCCGAGTTTCAG |
| | | | GAGAAGCTCGCCGACGACACATCCTTCGGGGGAAACCTCGGAAAGGCAGT |
| | | | CTTTCAGGCCAAGAAAAGGGTTCTCGAACCTTTTGGCCTGGTTGAAGAGG |
| | | | GTGCTAAGACGGCCCCTACCGGAAAGCGGATAGACGACCACTTTCCAAAA |
| | | | AGAAAGAAGGCTCGGACCGAAGAGGACTCCAAGCCTTCCACCTCGTCAGA |
| | | | CGCCGAAGCTGGACCCAGCGGATCCCAGCAGCTGCAAATCCCAGCCCAAC |
| | | | CAGCCTCAAGTTTGGGAGCTGATACAATGTCTGCGGGAGGTGGCGGCCCA |
| | | | TTGGGCGACAATAACCAAGGTGCCGATGGAGTGGGCAATGCCTCGGGAGA |
| | | | TTGGCATTGCGATTCCACGTGGATGGGGGACAGAGTCGTCACCAAGTCCA |
| | | | CCCGAACCTGGGTGCTGCCCAGCTACAACAACCACCAGTACCGAGAGATC |
| | | | AAAAGCGGCTCCGTCGACGGAAGCAACGCCAACGCCTACTTTGGATACAG |
| | | | CACCCCCTGGGGGTACTTTGACTTTAACCGCTTCCACAGCCACTGGAGCC |
| | | | CCCGAGACTGGCAAAGACTCATCAACAACTACTGGGGCTTCAGACCCCGG |
| | | | TCCCTCAGAGTCAAAATCTTCAACATTCAAGTCAAAGAGGTCACGGTGCA |
| | | | GGACTCCACCACCACCATCGCCAACAACCTCACCTCCACCGTCCAAGTGT |
| | | | TTACGGACGACGACTACCAGCTGCCCTACGTCGTCGGCAACGGGACCGAG |
| | | | GGATGCCTGCCGGCCTTCCCTCCGCAGGTCTTTACGCTGCCGCAGTACGG |
| | | | TTACGCGACGCTGAACCGCGACAACACAGAAAATCCCACCGAGAGGAGCA |
| | | | GCTTCTTCTGCCTAGAGTACTTTCCCAGCAAGATGCTGAGAACGGGCAAC |
| | | | AACTTTGAGTTTACCTACAACTTTGAGGAGGTGCCCTTCCACTCCAGCTT |
| | | | CGCTCCCAGTCAGAACCTGTTCAAGCTGGCCAACCCGCTGGTGGACCAGT |
| | | | ACTTGTACCGCTTCGTGAGCACAAATAACACTGGCGGAGTCCAGTTCAAC |
| | | | AAGAACCTGGCCGGGAGATACGCCAACACCTACAAAAACTGGTTCCCGGG |
| | | | GCCCATGGGCCGAACCCAGGGCTGGAACCTGGGCTCCGGGGTCAACCGCG |
| | | | CCAGTGTCAGCGCCTTCGCCACGACCAATAGGATGGAGCTCGAGGGCGCG |
| | | | AGTTACCAGGTGCCCCCGCAGCCGAACGGCATGACCAACAACCTCCAGGG |
| | | | CAGCAACACCTATGCCCTGGAGAACACTATGATCTTCAACAGCCAGCCGG |
| | | | CGAACCCGGGCACCACCGCCACGTACCTCGAGGGCAACATGCTCATCACC |
| | | | AGCGAGAGCGAGACACAGCCGGTGAACCGCGTGGCGTACAACGTCGGCGG |
| | | | GCAGATGGCCACCAACAACCAGAGCTCCACCACTGCCCCCGCGACCGGCA |
| | | | CGTACAACCTCCAGGAAATCGTGCCCGGCAGCGTGTGGATGGAGAGGGAC |
| | | | GTGTACCTCCAAGGACCCATCTGGGCCAAGATCCCAGAGACAGGGGCGCA |
| | | | CTTTCACCCCTCTCCGGCCATGGGCGGATTCGGACTCAAACACCCACCGC |
| | | | CCATGATGCTCATCAAGAACACGCCTGTGCCCGGAAATATCACCAGCTTC |
| | | | TCGGACGTGCCCGTCAGCAGCTTCATCACCCAGTACAGCACCGGGCAGGT |
| | | | CACCGTGGAGATGGAGTGGGAGCTCAAGAAGGAAAACTCCAAGAGGTGGA |
| | | | ACCCAGAGATCCAGTACACAAACAACTACAACGACCCCCAGTTTGTGGAC |
| | | | TTTGCCCCGGACAGCACCGGGGAATACAGAACCACCAGACCTATCGGAAC |
| | | | CCGATACCTTACCCGACCCCTTTAA |
| 191 | 48 | MAAP_aa | MISIKIKPVVLCCLVITISDPETGSIEESLSTGQTRSRESTTSRTTSSLR |
| | | | RETTPTSSTTTRTPSFRRSSPTTHPSGETSERQSFRPRKGFSNLLAWLKR |
| | | | VLRRPLPESG* |
| 192 | 48 | MAAP_nt | ATGATCAGCATCAAGATCAAGCCCGTGGTCTTGTGCTGCCTGGTTATAAC |
| | | | TATCTCGGACCCGGAAACGGGCTCGATCGAGGAGAGCCTGTCAACAGGGC |
| | | | AGACGAGGTCGCGCGAGAGCACGACATCTCGTACAACGAGCAGCTTGAGG |
| | | | CGGGAGACAACCCCTACCTCAAGTACAACCACGCGGACGCCGAGTTTCAG |
| | | | GAGAAGCTCGCCGACGACACATCCTTCGGGGGAAACCTCGGAAAGGCAGT |
| | | | CTTTCAGGCCAAGAAAAGGGTTCTCGAACCTTTTGGCCTGGTTGAAGAGG |
| | | | GTGCTAAGACGGCCCCTACCGGAAAGCGGATAG |
| 193 | 49 | VP1_aa | MSFVDHPPDWLEEVGEGLREFLGLEAGPPKPKPNQQHQDQARGLVLPGYN |
| | | | YLGPGNGLDRGEPVNRADEVAREHDKSYDEQLEAGDNPYLKYNHADAEFQ |
| | | | EKLADDTSFGGNLGKAVFQAKKRVLEPFGLVEEGAKTAPTGKRIDDHFPK |
| | | | RKKARTEEDSKPSTSSDAEAGPSGSQQLQIPAQPASSLGADTMSAGGGGP |
| | | | LGDNNQGADGVGNASGDWHCDSTWMGDRVVTKSTRTWVLPSYNNHQYREI |
| | | | KSGSVDGSNANAYFGYSTPWGYFDFNRFHSHWSPRDWQRLINNYWGFRPR |
| | | | SLRVKIFNIQVKEVTVQDSTTTIANNLTSTVQVFTDDDYQLPYVVGNGTE |
| | | | GCLPAFPPQVFTLPQYGYATLNRDNTENPTERSSFFCLEYFPSKMLRTGN |
| | | | NFEFTYNFEEVPFHSSFAPSQNLFKLANPLVDQYLYRFVSTNNTGGVQFN |
| | | | KNLAGRYANTYKNWFPGPMGRTQGWNLGSGVNRASVSAFATTNRMELEGA |
| | | | SYQVPPQPNGMTNNLQGSNTYALENTMIFNSQPANPGTTATYLEGNMLIT |
| | | | SESETQPVNRVAYNVGGQMATNNQSSTTAPATGTYNLQEIVPGSVWMERD |
| | | | VYLQGPIWAKIPETGAHFHPSPAMGGFGLKHPPPMMLIKNTPVPGNITSF |
| | | | SDVPVSSFITQYSTGQVTVEMEWELKKENSKRWNPEIQYTNNYNDPQFVD |
| | | | FAPDSTGEYRTTRPIGTRYLTRPL* |
| 194 | 49 | VP1_nt | ATGTCTTTTGTTGATCACCCTCCAGATTGGTTGGAAGAAGTTGGTGAAGG |
| | | | TCTTCGCGAGTTTTTGGGCCTTGAAGCGGGCCCACCGAAACCAAAACCCA |
| | | | ATCAGCAGCATCAAGATCAAGCCCGTGGTCTTGTGCTGCCTGGTTATAAC |
| | | | TATCTCGGACCCGGAAACGGGCTCGATCGAGGAGAGCCTGTCAACAGGGC |
| | | | AGACGAGGTCGCGCGAGAGCACGACAAGTCGTACGATGAGCAGCTTGAGG |
| | | | CGGGAGACAACCCCTACCTCAAGTACAACCACGCGGACGCCGAGTTTCAG |
| | | | GAGAAGCTCGCCGACGACACATCCTTCGGGGGAAACCTCGGAAAGGCAGT |
| | | | CTTTCAGGCCAAGAAAAGGGTTCTCGAACCTTTTGGCCTGGTTGAAGAGG |
| | | | GTGCTAAGACGGCCCCTACCGGAAAGCGGATAGACGACCACTTTCCAAAA |
| | | | AGAAAGAAGGCTCGGACCGAAGAGGACTCCAAGCCTTCCACCTCGTCAGA |
| | | | CGCCGAAGCTGGACCCAGCGGATCCCAGCAGCTGCAAATCCCAGCCCAAC |
| | | | CAGCCTCAAGTTTGGGAGCTGATACAATGTCTGCGGGAGGTGGCGGCCCA |
| | | | TTGGGCGACAATAACCAAGGTGCCGATGGAGTGGGCAATGCCTCGGGAGA |
| | | | TTGGCATTGCGATTCCACGTGGATGGGGGACAGAGTCGTCACCAAGTCCA |
| | | | CCCGAACCTGGGTGCTGCCCAGCTACAACAACCACCAGTACCGAGAGATC |
| | | | AAAAGCGGCTCCGTCGACGGAAGCAACGCCAACGCCTACTTTGGATACAG |
| | | | CACCCCCTGGGGGTACTTTGACTTTAACCGCTTCCACAGCCACTGGAGCC |
| | | | CCCGAGACTGGCAAAGACTCATCAACAACTACTGGGGCTTCAGACCCCGG |
| | | | TCCCTCAGAGTCAAAATCTTCAACATTCAAGTCAAAGAGGTCACGGTGCA |
| | | | GGACTCCACCACCACCATCGCCAACAACCTCACCTCCACCGTCCAAGTGT |
| | | | TTACGGACGACGACTACCAGCTGCCCTACGTCGTCGGCAACGGGACCGAG |
| | | | GGATGCCTGCCGGCCTTCCCTCCGCAGGTCTTTACGCTGCCGCAGTACGG |
| | | | TTACGCGACGCTGAACCGCGACAACACAGAAAATCCCACCGAGAGGAGCA |
| | | | GCTTCTTCTGCCTAGAGTACTTTCCCAGCAAGATGCTGAGAACGGGCAAC |
| | | | AACTTTGAGTTTACCTACAACTTTGAGGAGGTGCCCTTCCACTCCAGCTT |
| | | | CGCTCCCAGTCAGAACCTGTTCAAGCTGGCCAACCCGCTGGTGGACCAGT |
| | | | ACTTGTACCGCTTCGTGAGCACAAATAACACTGGCGGAGTCCAGTTCAAC |
| | | | AAGAACCTGGCCGGGAGATACGCCAACACCTACAAAAACTGGTTCCCGGG |
| | | | GCCCATGGGCCGAACCCAGGGCTGGAACCTGGGCTCCGGGGTCAACCGCG |
| | | | CCAGTGTCAGCGCCTTCGCCACGACCAATAGGATGGAGCTCGAGGGCGCG |
| | | | AGTTACCAGGTGCCCCCGCAGCCGAACGGCATGACCAACAACCTCCAGGG |
| | | | CAGCAACACCTATGCCCTGGAGAACACTATGATCTTCAACAGCCAGCCGG |
| | | | CGAACCCGGGCACCACCGCCACGTACCTCGAGGGCAACATGCTCATCACC |
| | | | AGCGAGAGCGAGACACAGCCGGTGAACCGCGTGGCGTACAACGTCGGCGG |
| | | | GCAGATGGCCACCAACAACCAGAGCTCCACCACTGCCCCCGCGACCGGCA |
| | | | CGTACAACCTCCAGGAAATCGTGCCCGGCAGCGTGTGGATGGAGAGGGAC |
| | | | GTGTACCTCCAAGGACCCATCTGGGCCAAGATCCCAGAGACAGGGGCGCA |
| | | | CTTTCACCCCTCTCCGGCCATGGGCGGATTCGGACTCAAACACCCACCGC |
| | | | CCATGATGCTCATCAAGAACACGCCTGTGCCCGGAAATATCACCAGCTTC |
| | | | TCGGACGTGCCCGTCAGCAGCTTCATCACCCAGTACAGCACCGGGCAGGT |
| | | | CACCGTGGAGATGGAGTGGGAGCTCAAGAAGGAAAACTCCAAGAGGTGGA |
| | | | ACCCAGAGATCCAGTACACAAACAACTACAACGACCCCCAGTTTGTGGAC |
| | | | TTTGCCCCGGACAGCACCGGGGAATACAGAACCACCAGACCTATCGGAAC |
| | | | CCGATACCTTACCCGACCCCTTTAA |
| 195 | 49 | MAAP_aa | MSSLRRETTPTSSTTTRTPSFRRSSPTTHPSGETSERQSFRPRKGFSNLL |
| | | | AWLKRVLRRPLPESG* |
| 196 | 49 | MAAP_nt | ATGAGCAGCTTGAGGCGGGAGACAACCCCTACCTCAAGTACAACCACGCG |
| | | | GACGCCGAGTTTCAGGAGAAGCTCGCCGACGACACATCCTTCGGGGGAAA |
| | | | CCTCGGAAAGGCAGTCTTTCAGGCCAAGAAAAGGGTTCTCGAACCTTTTG |
| | | | GCCTGGTTGAAGAGGGTGCTAAGACGGCCCCTACCGGAAAGCGGATAG |
| 197 | 50 | VP1_aa | MSFVDHPPDWLEEVGEGLREFHGLEAGPPKPKPNQQHQDQARGLVLPGYN |
| | | | YLGPGNGLDRGEPVNRADEVAREHDISYNEQLEAGDNPYLKYNHADAEFQ |
| | | | EKLADDTSFGGNLGKAVFQAKKRVLEPFGLVEEGAKTAPTGKRIDDHFPK |
| | | | RKKARTEEDSKPSTSSDAEAGPSGSQQLQIPAQPASSLGADTMSAGGGGP |
| | | | LGDNNQGADGVGNASGDWHCDSTWMGDRVVTKSTRTWVLPSYNNHQYREI |
| | | | KSGSVDGSNANAYFGYSTPWGYFDFNRFHSHWSPRDWQRLINNYWGFRPR |
| | | | SLRVKIFNIQVKEVTVQDSTTTIANNLTSTVQVFTDDDYQLPYVVGNGTE |
| | | | GCLPAFPPQVFTLPQYGYATLNRDNTENPTERSSFFCLEYFPSKMLRTGN |
| | | | NFEFTYNFEEVPFHSSFAPSQNLFKLANPLVDQYLYRFVSTNNTGGVQFN |
| | | | KNLAGRYANTYKNWFPGPMGRTQGWNLGSGVNRASVSAFATTNRMELEGA |
| | | | SYQVPPQPNGMTNNLQGSNTYALENTMIFNSQPANPGTTATYLEGNMLIT |
| | | | SESETQPVNRVAYNVGGQMATNNQSSTTAPATGTYNLQEIVPGSVWMERD |
| | | | VYLQGPIWAKIPETGAHFHPSPAMGGFGLKHPPPMMLIKNTPVPGNITSF |
| | | | SDVPVSSFITQYSTGQVTVEMEWELKKENSKRWNPEIQYTNNYNDPQFVD |
| | | | FAPDSTGEYRTTRPIGTRYLTRPL* |
| 198 | 50 | VP1_nt | ATGTCTTTTGTTGATCACCCTCCAGATTGGTTGGAAGAAGTTGGTGAAGG |
| | | | CCTTCGCGAGTTTCATGGCCTTGAAGCGGGCCCACCGAAACCAAAACCCA |
| | | | ATCAGCAGCATCAAGATCAAGCCCGTGGTCTTGTGCTGCCTGGTTATAAC |
| | | | TATCTCGGACCCGGAAACGGGCTCGATCGAGGAGAGCCTGTCAACAGGGC |
| | | | AGACGAGGTCGCGCGAGAGCACGACATCTCGTACAACGAGCAGCTTGAGG |
| | | | CGGGAGACAACCCCTACCTCAAGTACAACCACGCGGACGCCGAGTTTCAG |
| | | | GAGAAGCTCGCCGACGACACATCCTTCGGGGGAAACCTCGGAAAGGCAGT |
| | | | CTTTCAGGCCAAGAAAAGGGTTCTCGAACCTTTTGGCCTGGTTGAAGAGG |
| | | | GTGCTAAGACGGCCCCTACCGGAAAGCGGATAGACGACCACTTTCCAAAA |
| | | | AGAAAGAAGGCTCGGACCGAAGAGGACTCCAAGCCTTCCACCTCGTCAGA |
| | | | CGCCGAAGCTGGACCCAGCGGATCCCAGCAGCTGCAAATCCCAGCCCAAC |
| | | | CAGCCTCAAGTTTGGGAGCTGATACAATGTCTGCGGGAGGTGGCGGCCCA |
| | | | TTGGGCGACAATAACCAAGGTGCCGATGGAGTGGGCAATGCCTCGGGAGA |
| | | | TTGGCATTGCGATTCCACGTGGATGGGGGACAGAGTCGTCACCAAGTCCA |
| | | | CCCGAACCTGGGTGCTGCCCAGCTACAACAACCACCAGTACCGAGAGATC |
| | | | AAAAGCGGCTCCGTCGACGGAAGCAACGCCAACGCCTACTTTGGATACAG |
| | | | CACCCCCTGGGGGTACTTTGACTTTAACCGCTTCCACAGCCACTGGAGCC |
| | | | CCCGAGACTGGCAAAGACTCATCAACAACTACTGGGGCTTCAGACCCCGG |
| | | | TCCCTCAGAGTCAAAATCTTCAACATTCAAGTCAAAGAGGTCACGGTGCA |
| | | | GGACTCCACCACCACCATCGCCAACAACCTCACCTCCACCGTCCAAGTGT |
| | | | TTACGGACGACGACTACCAGCTGCCCTACGTCGTCGGCAACGGGACCGAG |
| | | | GGATGCCTGCCGGCCTTCCCTCCGCAGGTCTTTACGCTGCCGCAGTACGG |
| | | | TTACGCGACGCTGAACCGCGACAACACAGAAAATCCCACCGAGAGGAGCA |
| | | | GCTTCTTCTGCCTAGAGTACTTTCCCAGCAAGATGCTGAGAACGGGCAAC |
| | | | AACTTTGAGTTTACCTACAACTTTGAGGAGGTGCCCTTCCACTCCAGCTT |
| | | | CGCTCCCAGTCAGAACCTGTTCAAGCTGGCCAACCCGCTGGTGGACCAGT |
| | | | ACTTGTACCGCTTCGTGAGCACAAATAACACTGGCGGAGTCCAGTTCAAC |
| | | | AAGAACCTGGCCGGGAGATACGCCAACACCTACAAAAACTGGTTCCCGGG |
| | | | GCCCATGGGCCGAACCCAGGGCTGGAACCTGGGCTCCGGGGTCAACCGCG |
| | | | CCAGTGTCAGCGCCTTCGCCACGACCAATAGGATGGAGCTCGAGGGCGCG |
| | | | AGTTACCAGGTGCCCCCGCAGCCGAACGGCATGACCAACAACCTCCAGGG |
| | | | CAGCAACACCTATGCCCTGGAGAACACTATGATCTTCAACAGCCAGCCGG |
| | | | CGAACCCGGGCACCACCGCCACGTACCTCGAGGGCAACATGCTCATCACC |
| | | | AGCGAGAGCGAGACACAGCCGGTGAACCGCGTGGCGTACAACGTCGGCGG |
| | | | GCAGATGGCCACCAACAACCAGAGCTCCACCACTGCCCCCGCGACCGGCA |
| | | | CGTACAACCTCCAGGAAATCGTGCCCGGCAGCGTGTGGATGGAGAGGGAC |
| | | | GTGTACCTCCAAGGACCCATCTGGGCCAAGATCCCAGAGACAGGGGCGCA |
| | | | CTTTCACCCCTCTCCGGCCATGGGCGGATTCGGACTCAAACACCCACCGC |
| | | | CCATGATGCTCATCAAGAACACGCCTGTGCCCGGAAATATCACCAGCTTC |
| | | | TCGGACGTGCCCGTCAGCAGCTTCATCACCCAGTACAGCACCGGGCAGGT |
| | | | CACCGTGGAGATGGAGTGGGAGCTCAAGAAGGAAAACTCCAAGAGGTGGA |
| | | | ACCCAGAGATCCAGTACACAAACAACTACAACGACCCCCAGTTTGTGGAC |
| | | | TTTGCCCCGGACAGCACCGGGGAATACAGAACCACCAGACCTATCGGAAC |
| | | | CCGATACCTTACCCGACCCCTTTAA |
| 199 | 50 | MAAP_aa | MALKRAHRNQNPISSIKIKPVVLCCLVITISDPETGSIEESLSTGQTRSR |
| | | | ESTTSRTTSSLRRETTPTSSTTTRTPSFRRSSPTTHPSGETSERQSFRPR |
| | | | KGFSNLLAWLKRVLRRPLPESG* |
| 200 | 50 | MAAP_nt | ATGGCCTTGAAGCGGGCCCACCGAAACCAAAACCCAATCAGCAGCATCAA |
| | | | GATCAAGCCCGTGGTCTTGTGCTGCCTGGTTATAACTATCTCGGACCCGG |
| | | | AAACGGGCTCGATCGAGGAGAGCCTGTCAACAGGGCAGACGAGGTCGCGC |
| | | | GAGAGCACGACATCTCGTACAACGAGCAGCTTGAGGCGGGAGACAACCCC |
| | | | TACCTCAAGTACAACCACGCGGACGCCGAGTTTCAGGAGAAGCTCGCCGA |
| | | | CGACACATCCTTCGGGGGAAACCTCGGAAAGGCAGTCTTTCAGGCCAAGA |
| | | | AAAGGGTTCTCGAACCTTTTGGCCTGGTTGAAGAGGGTGCTAAGACGGCC |
| | | | CCTACCGGAAAGCGGATAG |
| 201 | 51 | VP1_aa | MSFVDHPPDWLETLGEGLREFWGLKPGPPKPKPAEQHQDQARGLVLPGYN |
| | | | YLGPGNGLDRGEPVNRADEVAREHDISYNEQLEAGDNPYLKYNHADAEFQ |
| | | | EKLADDTSFGGNLGKAVFQAKKRVLEPFGLVEEGAKTAPTGKRIDDHFPK |
| | | | RKKARTEEDSKPSTSSDAEAGPSGSQQLQIPAQPASSLGADTMSAGGGGP |
| | | | LGDNNQGADGVGNASGDWHCDSTWMGDRVVTKSTRTWVLPSYNNHQYREI |
| | | | KSGSVDGSNANAYFGYSTPWGYFDFNRFHSHWSPRDWQRLINNYWGFRPR |
| | | | SLRVKIFNIQVKEVTVQDSTTTIANNLTSTVQVFTDDDYQLPYVVGNGTE |
| | | | GCLPAFPPQVFTLPQYGYATLNRDNTENPTERSSFFCLEYFPSKMLRTGN |
| | | | NFEFTYNFEEVPFHSSFAPSQNLFKLANPLVDQYLYRFVSTNNTGGVQFN |
| | | | KNLAGRYANTYKNWFPGPMGRTQGWNLGSGVNRASVSAFATTNRMELEGA |
| | | | SYQVPPQPNGMTNNLQGSNTYALENTMIFNSQPANPGTTATYLEGNMLIT |
| | | | SESETQPVNRVAYNVGGQMATNNQSSTTAPATGTYNLQEIVPGSVWMERD |
| | | | VYLQGPIWAKIPETGAHFHPSPAMGGFGLKHPPPMMLIKNTPVPGNITSF |
| | | | SDVPVSSFITQYSTGQVTVEMEWELKKENSKRWNPEIQYTNNYNDPQFVD |
| | | | FAPDSTGEYRTTRPIGTRYLTRPL* |
| 202 | 51 | VP1_nt | ATGTCTTTTGTTGATCACCCTCCAGATTGGTTGGAAACGCTCGGTGAAGG |
| | | | TCTACGCGAGTTTTGGGGCCTTAAACCTGGCCCACCGAAACCAAAACCCG |
| | | | CTGAGCAGCATCAAGATCAAGCCCGTGGTCTTGTGCTGCCTGGTTATAAC |
| | | | TATCTCGGACCCGGAAACGGGCTCGATCGAGGAGAGCCTGTCAACAGGGC |
| | | | AGACGAGGTCGCGCGAGAGCACGACATCTCGTACAACGAGCAGCTTGAGG |
| | | | CGGGAGACAACCCCTACCTCAAGTACAACCACGCGGACGCCGAGTTTCAG |
| | | | GAGAAGCTCGCCGACGACACATCCTTCGGGGGAAACCTCGGAAAGGCAGT |
| | | | CTTTCAGGCCAAGAAAAGGGTTCTCGAACCTTTTGGCCTGGTTGAAGAGG |
| | | | GTGCTAAGACGGCCCCTACCGGAAAGCGGATAGACGACCACTTTCCAAAA |
| | | | AGAAAGAAGGCTCGGACCGAAGAGGACTCCAAGCCTTCCACCTCGTCAGA |
| | | | CGCCGAAGCTGGACCCAGCGGATCCCAGCAGCTGCAAATCCCAGCCCAAC |
| | | | CAGCCTCAAGTTTGGGAGCTGATACAATGTCTGCGGGAGGTGGCGGCCCA |
| | | | TTGGGCGACAATAACCAAGGTGCCGATGGAGTGGGCAATGCCTCGGGAGA |
| | | | TTGGCATTGCGATTCCACGTGGATGGGGGACAGAGTCGTCACCAAGTCCA |
| | | | CCCGAACCTGGGTGCTGCCCAGCTACAACAACCACCAGTACCGAGAGATC |
| | | | AAAAGCGGCTCCGTCGACGGAAGCAACGCCAACGCCTACTTTGGATACAG |
| | | | CACCCCCTGGGGGTACTTTGACTTTAACCGCTTCCACAGCCACTGGAGCC |
| | | | CCCGAGACTGGCAAAGACTCATCAACAACTACTGGGGCTTCAGACCCCGG |
| | | | TCCCTCAGAGTCAAAATCTTCAACATTCAAGTCAAAGAGGTCACGGTGCA |
| | | | GGACTCCACCACCACCATCGCCAACAACCTCACCTCCACCGTCCAAGTGT |
| | | | TTACGGACGACGACTACCAGCTGCCCTACGTCGTCGGCAACGGGACCGAG |
| | | | GGATGCCTGCCGGCCTTCCCTCCGCAGGTCTTTACGCTGCCGCAGTACGG |
| | | | TTACGCGACGCTGAACCGCGACAACACAGAAAATCCCACCGAGAGGAGCA |
| | | | GCTTCTTCTGCCTAGAGTACTTTCCCAGCAAGATGCTGAGAACGGGCAAC |
| | | | AACTTTGAGTTTACCTACAACTTTGAGGAGGTGCCCTTCCACTCCAGCTT |
| | | | CGCTCCCAGTCAGAACCTGTTCAAGCTGGCCAACCCGCTGGTGGACCAGT |
| | | | ACTTGTACCGCTTCGTGAGCACAAATAACACTGGCGGAGTCCAGTTCAAC |
| | | | AAGAACCTGGCCGGGAGATACGCCAACACCTACAAAAACTGGTTCCCGGG |
| | | | GCCCATGGGCCGAACCCAGGGCTGGAACCTGGGCTCCGGGGTCAACCGCG |
| | | | CCAGTGTCAGCGCCTTCGCCACGACCAATAGGATGGAGCTCGAGGGCGCG |
| | | | AGTTACCAGGTGCCCCCGCAGCCGAACGGCATGACCAACAACCTCCAGGG |
| | | | CAGCAACACCTATGCCCTGGAGAACACTATGATCTTCAACAGCCAGCCGG |
| | | | CGAACCCGGGCACCACCGCCACGTACCTCGAGGGCAACATGCTCATCACC |
| | | | AGCGAGAGCGAGACACAGCCGGTGAACCGCGTGGCGTACAACGTCGGCGG |
| | | | GCAGATGGCCACCAACAACCAGAGCTCCACCACTGCCCCCGCGACCGGCA |
| | | | CGTACAACCTCCAGGAAATCGTGCCCGGCAGCGTGTGGATGGAGAGGGAC |
| | | | GTGTACCTCCAAGGACCCATCTGGGCCAAGATCCCAGAGACAGGGGCGCA |
| | | | CTTTCACCCCTCTCCGGCCATGGGCGGATTCGGACTCAAACACCCACCGC |
| | | | CCATGATGCTCATCAAGAACACGCCTGTGCCCGGAAATATCACCAGCTTC |
| | | | TCGGACGTGCCCGTCAGCAGCTTCATCACCCAGTACAGCACCGGGCAGGT |
| | | | CACCGTGGAGATGGAGTGGGAGCTCAAGAAGGAAAACTCCAAGAGGTGGA |
| | | | ACCCAGAGATCCAGTACACAAACAACTACAACGACCCCCAGTTTGTGGAC |
| | | | TTTGCCCCGGACAGCACCGGGGAATACAGAACCACCAGACCTATCGGAAC |
| | | | CCGATACCTTACCCGACCCCTTTAA |
| 203 | 51 | MAAP_aa | LAHRNQNPLSSIKIKPVVLCCLVITISDPETGSIEESLSTGQTRSRESTT |
| | | | SRTTSSLRRETTPTSSTTTRTPSFRRSSPTTHPSGETSERQSFRPRKGFS |
| | | | NLLAWLKRVLRRPLPESG* |
| 204 | 51 | MAAP_nt | CTGGCCCACCGAAACCAAAACCCGCTGAGCAGCATCAAGATCAAGCCCGT |
| | | | GGTCTTGTGCTGCCTGGTTATAACTATCTCGGACCCGGAAACGGGCTCGA |
| | | | TCGAGGAGAGCCTGTCAACAGGGCAGACGAGGTCGCGCGAGAGCACGACA |
| | | | TCTCGTACAACGAGCAGCTTGAGGCGGGAGACAACCCCTACCTCAAGTAC |
| | | | AACCACGCGGACGCCGAGTTTCAGGAGAAGCTCGCCGACGACACATCCTT |
| | | | CGGGGGAAACCTCGGAAAGGCAGTCTTTCAGGCCAAGAAAAGGGTTCTCG |
| | | | AACCTTTTGGCCTGGTTGAAGAGGGTGCTAAGACGGCCCCTACCGGAAAG |
| | | | CGGATAG |
| 205 | 52 | VP1_aa | MSFVDHPPDWLEEVGEGLREFLGLEAGPPKPKPNQQHDDQARGLVLPGYN |
| | | | YLGPGNGLDRGEPVNRADEVAREHDISYNEQLEAGDNPYLKYNHADAEFQ |
| | | | EKLADDTSFGGNLGKAVFQAKKRVLEPFGLVEEGAKTAPTGKRIDDHFPK |
| | | | RKKARTEEDSKPSTSSDAEAGPSGSQQLQIPAQPASSLGADTMSAGGGGP |
| | | | LGDNNQGADGVGNASGDWHCDSTWMGDRVVTKSTRTWVLPSYNNHQYREI |
| | | | KSGSVDGSNANAYFGYSTPWGYFDFNRFHSHWSPRDWQRLINNYWGFRPR |
| | | | SLRVKIFNIQVKEVTVQDSTTTIANNLTSTVQVFTDDDYQLPYVVGNGTE |
| | | | GCLPAFPPQVFTLPQYGYATLNRDNTENPTERSSFFCLEYFPSKMLRTGN |
| | | | NFEFTYNFEEVPFHSSFAPSQNLFKLANPLVDQYLYRFVSTNNTGGVQFN |
| | | | KNLAGRYANTYKNWFPGPMGRTQGWNLGSGVNRASVSAFATTNRMELEGA |
| | | | SYQVPPQPNGMTNNLQGSNTYALENTMIFNSQPANPGTTATYLEGNMLIT |
| | | | SESETQPVNRVAYNVGGQMATNNQSSTTAPATGTYNLQEIVPGSVWMERD |
| | | | VYLQGPIWAKIPETGAHFHPSPAMGGFGLKHPPPMMLIKNTPVPGNITSF |
| | | | SDVPVSSFITQYSTGQVTVEMEWELKKENSKRWNPEIQYTNNYNDPQFVD |
| | | | FAPDSTGEYRTTRPIGTRYLTRPL* |
| 206 | 52 | VP1_nt | ATGTCTTTTGTTGATCACCCTCCAGATTGGTTGGAAGAAGTTGGTGAAGG |
| | | | TCTTCGCGAGTTTTTGGGCCTTGAAGCGGGCCCACCGAAACCAAAACCCA |
| | | | ATCAGCAGCATGACGATCAAGCCCGTGGTCTTGTGCTGCCTGGTTATAAC |
| | | | TATCTCGGACCCGGAAACGGGCTCGATCGAGGAGAGCCTGTCAACAGGGC |
| | | | AGACGAGGTCGCGCGAGAGCACGACATCTCGTACAACGAGCAGCTTGAGG |
| | | | CGGGAGACAACCCCTACCTCAAGTACAACCACGCGGACGCCGAGTTTCAG |
| | | | GAGAAGCTCGCCGACGACACATCCTTCGGGGGAAACCTCGGAAAGGCAGT |
| | | | CTTTCAGGCCAAGAAAAGGGTTCTCGAACCTTTTGGCCTGGTTGAAGAGG |
| | | | GTGCTAAGACGGCCCCTACCGGAAAGCGGATAGACGACCACTTTCCAAAA |
| | | | AGAAAGAAGGCTCGGACCGAAGAGGACTCCAAGCCTTCCACCTCGTCAGA |
| | | | CGCCGAAGCTGGACCCAGCGGATCCCAGCAGCTGCAAATCCCAGCCCAAC |
| | | | CAGCCTCAAGTTTGGGAGCTGATACAATGTCTGCGGGAGGTGGCGGCCCA |
| | | | TTGGGCGACAATAACCAAGGTGCCGATGGAGTGGGCAATGCCTCGGGAGA |
| | | | TTGGCATTGCGATTCCACGTGGATGGGGGACAGAGTCGTCACCAAGTCCA |
| | | | CCCGAACCTGGGTGCTGCCCAGCTACAACAACCACCAGTACCGAGAGATC |
| | | | AAAAGCGGCTCCGTCGACGGAAGCAACGCCAACGCCTACTTTGGATACAG |
| | | | CACCCCCTGGGGGTACTTTGACTTTAACCGCTTCCACAGCCACTGGAGCC |
| | | | CCCGAGACTGGCAAAGACTCATCAACAACTACTGGGGCTTCAGACCCCGG |
| | | | TCCCTCAGAGTCAAAATCTTCAACATTCAAGTCAAAGAGGTCACGGTGCA |
| | | | GGACTCCACCACCACCATCGCCAACAACCTCACCTCCACCGTCCAAGTGT |
| | | | TTACGGACGACGACTACCAGCTGCCCTACGTCGTCGGCAACGGGACCGAG |
| | | | GGATGCCTGCCGGCCTTCCCTCCGCAGGTCTTTACGCTGCCGCAGTACGG |
| | | | TTACGCGACGCTGAACCGCGACAACACAGAAAATCCCACCGAGAGGAGCA |
| | | | GCTTCTTCTGCCTAGAGTACTTTCCCAGCAAGATGCTGAGAACGGGCAAC |
| | | | AACTTTGAGTTTACCTACAACTTTGAGGAGGTGCCCTTCCACTCCAGCTT |
| | | | CGCTCCCAGTCAGAACCTGTTCAAGCTGGCCAACCCGCTGGTGGACCAGT |
| | | | ACTTGTACCGCTTCGTGAGCACAAATAACACTGGCGGAGTCCAGTTCAAC |
| | | | AAGAACCTGGCCGGGAGATACGCCAACACCTACAAAAACTGGTTCCCGGG |
| | | | GCCCATGGGCCGAACCCAGGGCTGGAACCTGGGCTCCGGGGTCAACCGCG |
| | | | CCAGTGTCAGCGCCTTCGCCACGACCAATAGGATGGAGCTCGAGGGCGCG |
| | | | AGTTACCAGGTGCCCCCGCAGCCGAACGGCATGACCAACAACCTCCAGGG |
| | | | CAGCAACACCTATGCCCTGGAGAACACTATGATCTTCAACAGCCAGCCGG |
| | | | CGAACCCGGGCACCACCGCCACGTACCTCGAGGGCAACATGCTCATCACC |
| | | | AGCGAGAGCGAGACACAGCCGGTGAACCGCGTGGCGTACAACGTCGGCGG |
| | | | GCAGATGGCCACCAACAACCAGAGCTCCACCACTGCCCCCGCGACCGGCA |
| | | | CGTACAACCTCCAGGAAATCGTGCCCGGCAGCGTGTGGATGGAGAGGGAC |
| | | | GTGTACCTCCAAGGACCCATCTGGGCCAAGATCCCAGAGACAGGGGCGCA |
| | | | CTTTCACCCCTCTCCGGCCATGGGCGGATTCGGACTCAAACACCCACCGC |
| | | | CCATGATGCTCATCAAGAACACGCCTGTGCCCGGAAATATCACCAGCTTC |
| | | | TCGGACGTGCCCGTCAGCAGCTTCATCACCCAGTACAGCACCGGGCAGGT |
| | | | CACCGTGGAGATGGAGTGGGAGCTCAAGAAGGAAAACTCCAAGAGGTGGA |
| | | | ACCCAGAGATCCAGTACACAAACAACTACAACGACCCCCAGTTTGTGGAC |
| | | | TTTGCCCCGGACAGCACCGGGGAATACAGAACCACCAGACCTATCGGAAC |
| | | | CCGATACCTTACCCGACCCCTTTAA |
| 207 | 52 | MAAP_aa | MTIKPVVLCCLVITISDPETGSIEESLSTGQTRSRESTTSRTTSSLRRET |
| | | | TPTSSTTTRTPSFRRSSPTTHPSGETSERQSFRPRKGFSNLLAWLKRVLR |
| | | | RPLPESG* |
| 208 | 52 | MAAP_nt | ATGACGATCAAGCCCGTGGTCTTGTGCTGCCTGGTTATAACTATCTCGGA |
| | | | CCCGGAAACGGGCTCGATCGAGGAGAGCCTGTCAACAGGGCAGACGAGGT |
| | | | CGCGCGAGAGCACGACATCTCGTACAACGAGCAGCTTGAGGCGGGAGACA |
| | | | ACCCCTACCTCAAGTACAACCACGCGGACGCCGAGTTTCAGGAGAAGCTC |
| | | | GCCGACGACACATCCTTCGGGGGAAACCTCGGAAAGGCAGTCTTTCAGGC |
| | | | CAAGAAAAGGGTTCTCGAACCTTTTGGCCTGGTTGAAGAGGGTGCTAAGA |
| | | | CGGCCCCTACCGGAAAGCGGATAG |
| 209 | 53 | VP1_aa | MSFVDGPPDWLEEVGEGLREFLGLEAGPPKPKPNQQHQDQARGLVLPGYN |
| | | | YLGPGNGLDRGEPVNRADEVAREHDISYNEQLEAGDNPYLKYNHADAEFQ |
| | | | EKLADDTSFGGNLGKAVFQAKKRVLEPFGLVEEGAKTAPTGKRIDDHFPK |
| | | | RKKARTEEDSKPSTSSDAEAGPSGSQQLQIPAQPASSLGADTMSAGGGGP |
| | | | LGDNNQGADGVGNASGDWHCDSTWMGDRVVTKSTRTWVLPSYNNHQYREI |
| | | | KSGSVDGSNANAYFGYSTPWGYFDFNRFHSHWSPRDWQRLINNYWGFRPR |
| | | | SLRVKIFNIQVKEVTVQDSTTTIANNLTSTVQVFTDDDYQLPYVVGNGTE |
| | | | GCLPAFPPQVFTLPQYGYATLNRDNTENPTERSSFFCLEYFPSKMLRTGN |
| | | | NFEFTYNFEEVPFHSSFAPSQNLFKLANPLVDQYLYRFVSTNNTGGVQFN |
| | | | KNLAGRYANTYKNWFPGPMGRTQGWNLGSGVNRASVSAFATTNRMELEGA |
| | | | SYQVPPQPNGMTNNLQGSNTYALENTMIFNSQPANPGTTATYLEGNMLIT |
| | | | SESETQPVNRVAYNVGGQMATNNQSSTTAPATGTYNLQEIVPGSVWMERD |
| | | | VYLQGPIWAKIPETGAHFHPSPAMGGFGLKHPPPMMLIKNTPVPGNITSF |
| | | | SDVPVSSFITQYSTGQVTVEMEWELKKENSKRWNPEIQYTNNYNDPQFVD |
| | | | FAPDSTGEYRTTRPIGTRYLTRPL* |
| 210 | 53 | VP1_nt | ATGTCTTTTGTTGATGGACCTCCAGATTGGTTGGAAGAAGTTGGTGAAGG |
| | | | TCTGCGCGAGTTTTTGGGCCTTGAAGCGGGCCCACCGAAACCAAAACCCA |
| | | | ATCAGCAGCATCAAGATCAAGCCCGTGGTCTTGTGCTGCCTGGTTATAAC |
| | | | TATCTCGGACCCGGAAACGGGCTCGATCGAGGAGAGCCTGTCAACAGGGC |
| | | | AGACGAGGTCGCGCGAGAGCACGACATCTCGTACAACGAGCAGCTTGAGG |
| | | | CGGGAGACAACCCCTACCTCAAGTACAACCACGCGGACGCCGAGTTTCAG |
| | | | GAGAAGCTCGCCGACGACACATCCTTCGGGGGAAACCTCGGAAAGGCAGT |
| | | | CTTTCAGGCCAAGAAAAGGGTTCTCGAACCTTTTGGCCTGGTTGAAGAGG |
| | | | GTGCTAAGACGGCCCCTACCGGAAAGCGGATAGACGACCACTTTCCAAAA |
| | | | AGAAAGAAGGCTCGGACCGAAGAGGACTCCAAGCCTTCCACCTCGTCAGA |
| | | | CGCCGAAGCTGGACCCAGCGGATCCCAGCAGCTGCAAATCCCAGCCCAAC |
| | | | CAGCCTCAAGTTTGGGAGCTGATACAATGTCTGCGGGAGGTGGCGGCCCA |
| | | | TTGGGCGACAATAACCAAGGTGCCGATGGAGTGGGCAATGCCTCGGGAGA |
| | | | TTGGCATTGCGATTCCACGTGGATGGGGGACAGAGTCGTCACCAAGTCCA |
| | | | CCCGAACCTGGGTGCTGCCCAGCTACAACAACCACCAGTACCGAGAGATC |
| | | | AAAAGCGGCTCCGTCGACGGAAGCAACGCCAACGCCTACTTTGGATACAG |
| | | | CACCCCCTGGGGGTACTTTGACTTTAACCGCTTCCACAGCCACTGGAGCC |
| | | | CCCGAGACTGGCAAAGACTCATCAACAACTACTGGGGCTTCAGACCCCGG |
| | | | TCCCTCAGAGTCAAAATCTTCAACATTCAAGTCAAAGAGGTCACGGTGCA |
| | | | GGACTCCACCACCACCATCGCCAACAACCTCACCTCCACCGTCCAAGTGT |
| | | | TTACGGACGACGACTACCAGCTGCCCTACGTCGTCGGCAACGGGACCGAG |
| | | | GGATGCCTGCCGGCCTTCCCTCCGCAGGTCTTTACGCTGCCGCAGTACGG |
| | | | TTACGCGACGCTGAACCGCGACAACACAGAAAATCCCACCGAGAGGAGCA |
| | | | GCTTCTTCTGCCTAGAGTACTTTCCCAGCAAGATGCTGAGAACGGGCAAC |
| | | | AACTTTGAGTTTACCTACAACTTTGAGGAGGTGCCCTTCCACTCCAGCTT |
| | | | CGCTCCCAGTCAGAACCTGTTCAAGCTGGCCAACCCGCTGGTGGACCAGT |
| | | | ACTTGTACCGCTTCGTGAGCACAAATAACACTGGCGGAGTCCAGTTCAAC |
| | | | AAGAACCTGGCCGGGAGATACGCCAACACCTACAAAAACTGGTTCCCGGG |
| | | | GCCCATGGGCCGAACCCAGGGCTGGAACCTGGGCTCCGGGGTCAACCGCG |
| | | | CCAGTGTCAGCGCCTTCGCCACGACCAATAGGATGGAGCTCGAGGGCGCG |
| | | | AGTTACCAGGTGCCCCCGCAGCCGAACGGCATGACCAACAACCTCCAGGG |
| | | | CAGCAACACCTATGCCCTGGAGAACACTATGATCTTCAACAGCCAGCCGG |
| | | | CGAACCCGGGCACCACCGCCACGTACCTCGAGGGCAACATGCTCATCACC |
| | | | AGCGAGAGCGAGACACAGCCGGTGAACCGCGTGGCGTACAACGTCGGCGG |
| | | | GCAGATGGCCACCAACAACCAGAGCTCCACCACTGCCCCCGCGACCGGCA |
| | | | CGTACAACCTCCAGGAAATCGTGCCCGGCAGCGTGTGGATGGAGAGGGAC |
| | | | GTGTACCTCCAAGGACCCATCTGGGCCAAGATCCCAGAGACAGGGGCGCA |
| | | | CTTTCACCCCTCTCCGGCCATGGGCGGATTCGGACTCAAACACCCACCGC |
| | | | CCATGATGCTCATCAAGAACACGCCTGTGCCCGGAAATATCACCAGCTTC |
| | | | TCGGACGTGCCCGTCAGCAGCTTCATCACCCAGTACAGCACCGGGCAGGT |
| | | | CACCGTGGAGATGGAGTGGGAGCTCAAGAAGGAAAACTCCAAGAGGTGGA |
| | | | ACCCAGAGATCCAGTACACAAACAACTACAACGACCCCCAGTTTGTGGAC |
| | | | TTTGCCCCGGACAGCACCGGGGAATACAGAACCACCAGACCTATCGGAAC |
| | | | CCGATACCTTACCCGACCCCTTTAA |
| 211 | 53 | MAAP_aa | MDLQIGWKKLVKVCASFWALKRAHRNQNPISSIKIKPVVLCCLVITISDP |
| | | | ETGSIEESLSTGQTRSRESTTSRTTSSLRRETTPTSSTTTRTPSFRRSSP |
| | | | TTHPSGETSERQSFRPRKGFSNLLAWLKRVLRRPLPESG* |
| 212 | 53 | MAAP_nt | ATGGACCTCCAGATTGGTTGGAAGAAGTTGGTGAAGGTCTGCGCGAGTTT |
| | | | TTGGGCCTTGAAGCGGGCCCACCGAAACCAAAACCCAATCAGCAGCATCA |
| | | | AGATCAAGCCCGTGGTCTTGTGCTGCCTGGTTATAACTATCTCGGACCCG |
| | | | GAAACGGGCTCGATCGAGGAGAGCCTGTCAACAGGGCAGACGAGGTCGCG |
| | | | CGAGAGCACGACATCTCGTACAACGAGCAGCTTGAGGCGGGAGACAACCC |
| | | | CTACCTCAAGTACAACCACGCGGACGCCGAGTTTCAGGAGAAGCTCGCCG |
| | | | ACGACACATCCTTCGGGGGAAACCTCGGAAAGGCAGTCTTTCAGGCCAAG |
| | | | AAAAGGGTTCTCGAACCTTTTGGCCTGGTTGAAGAGGGTGCTAAGACGGC |
| | | | CCCTACCGGAAAGCGGATAG |
| 213 | 54 | VP1_aa | MSFVDHPPDWLEEVGEGLREFLGLEAGPPKPKPAQRHKDDSRGLVLPGYR |
| | | | YLGPFNGLDKGEPVNEADEVAREHDISYNEQLEAGDNPYLKYNHADAEFQ |
| | | | EKLADDTSFGGNLGKAVFQAKKRVLEPFGLVEEGAKTAPTGKRIDDHFPK |
| | | | RKKARTEEDSKPSTSSDAEAGPSGSQQLQIPAQPASSLGADTMSAGGGGP |
| | | | LGDNNQGADGVGNASGDWHCDSTWMGDRVVTKSTRTWVLPSYNNHQYREI |
| | | | KSGSVDGSNANAYFGYSTPWGYFDFNRFHSHWSPRDWQRLINNYWGFRPR |
| | | | SLRVKIFNIQVKEVTVQDSTTTIANNLTSTVQVFTDDDYQLPYVVGNGTE |
| | | | GCLPAFPPQVFTLPQYGYATLNRDNTENPTERSSFFCLEYFPSKMLRTGN |
| | | | NFEFTYNFEEVPFHSSFAPSQNLFKLANPLVDQYLYRFVSTNNTGGVQFN |
| | | | KNLAGRYANTYKNWFPGPMGRTQGWNLGSGVNRASVSAFATTNRMELEGA |
| | | | SYQVPPQPNGMTNNLQGSNTYALENTMIFNSQPANPGTTATYLEGNMLIT |
| | | | SESETQPVNRVAYNVGGQMATNNQSSTTAPATGTYNLQEIVPGSVWMERD |
| | | | VYLQGPIWAKIPETGAHFHPSPAMGGFGLKHPPPMMLIKNTPVPGNITSF |
| | | | SDVPVSSFITQYSTGQVTVEMEWELKKENSKRWNPEIQYTNNYNDPQFVD |
| | | | FAPDSTGEYRTTRPIGTRYLTRPL* |
| 214 | 54 | VP1_nt | ATGTCTTTTGTTGATCACCCTCCAGATTGGTTGGAAGAAGTTGGTGAAGG |
| | | | TCTTCGCGAGTTTTTGGGCCTTGAAGCGGGCCCACCGAAACCAAAACCCG |
| | | | CTCAGCGCCATAAGGATGATAGTCGTGGTCTTGTGCTGCCTGGTTATCGC |
| | | | TATCTCGGACCCTTCAACGGGCTCGATAAGGGAGAGCCTGTCAACGAGGC |
| | | | AGACGAGGTCGCGCGAGAGCACGACATCTCGTACAACGAGCAGCTTGAGG |
| | | | CGGGAGACAACCCCTACCTCAAGTACAACCACGCGGACGCCGAGTTTCAG |
| | | | GAGAAGCTCGCCGACGACACATCCTTCGGGGGAAACCTCGGAAAGGCAGT |
| | | | CTTTCAGGCCAAGAAAAGGGTTCTCGAACCTTTTGGCCTGGTTGAAGAGG |
| | | | GTGCTAAGACGGCCCCTACCGGAAAGCGGATAGACGACCACTTTCCAAAA |
| | | | AGAAAGAAGGCTCGGACCGAAGAGGACTCCAAGCCTTCCACCTCGTCAGA |
| | | | CGCCGAAGCTGGACCCAGCGGATCCCAGCAGCTGCAAATCCCAGCCCAAC |
| | | | CAGCCTCAAGTTTGGGAGCTGATACAATGTCTGCGGGAGGTGGCGGCCCA |
| | | | TTGGGCGACAATAACCAAGGTGCCGATGGAGTGGGCAATGCCTCGGGAGA |
| | | | TTGGCATTGCGATTCCACGTGGATGGGGGACAGAGTCGTCACCAAGTCCA |
| | | | CCCGAACCTGGGTGCTGCCCAGCTACAACAACCACCAGTACCGAGAGATC |
| | | | AAAAGCGGCTCCGTCGACGGAAGCAACGCCAACGCCTACTTTGGATACAG |
| | | | CACCCCCTGGGGGTACTTTGACTTTAACCGCTTCCACAGCCACTGGAGCC |
| | | | CCCGAGACTGGCAAAGACTCATCAACAACTACTGGGGCTTCAGACCCCGG |
| | | | TCCCTCAGAGTCAAAATCTTCAACATTCAAGTCAAAGAGGTCACGGTGCA |
| | | | GGACTCCACCACCACCATCGCCAACAACCTCACCTCCACCGTCCAAGTGT |
| | | | TTACGGACGACGACTACCAGCTGCCCTACGTCGTCGGCAACGGGACCGAG |
| | | | GGATGCCTGCCGGCCTTCCCTCCGCAGGTCTTTACGCTGCCGCAGTACGG |
| | | | TTACGCGACGCTGAACCGCGACAACACAGAAAATCCCACCGAGAGGAGCA |
| | | | GCTTCTTCTGCCTAGAGTACTTTCCCAGCAAGATGCTGAGAACGGGCAAC |
| | | | AACTTTGAGTTTACCTACAACTTTGAGGAGGTGCCCTTCCACTCCAGCTT |
| | | | CGCTCCCAGTCAGAACCTGTTCAAGCTGGCCAACCCGCTGGTGGACCAGT |
| | | | ACTTGTACCGCTTCGTGAGCACAAATAACACTGGCGGAGTCCAGTTCAAC |
| | | | AAGAACCTGGCCGGGAGATACGCCAACACCTACAAAAACTGGTTCCCGGG |
| | | | GCCCATGGGCCGAACCCAGGGCTGGAACCTGGGCTCCGGGGTCAACCGCG |
| | | | CCAGTGTCAGCGCCTTCGCCACGACCAATAGGATGGAGCTCGAGGGCGCG |
| | | | AGTTACCAGGTGCCCCCGCAGCCGAACGGCATGACCAACAACCTCCAGGG |
| | | | CAGCAACACCTATGCCCTGGAGAACACTATGATCTTCAACAGCCAGCCGG |
| | | | CGAACCCGGGCACCACCGCCACGTACCTCGAGGGCAACATGCTCATCACC |
| | | | AGCGAGAGCGAGACACAGCCGGTGAACCGCGTGGCGTACAACGTCGGCGG |
| | | | GCAGATGGCCACCAACAACCAGAGCTCCACCACTGCCCCCGCGACCGGCA |
| | | | CGTACAACCTCCAGGAAATCGTGCCCGGCAGCGTGTGGATGGAGAGGGAC |
| | | | GTGTACCTCCAAGGACCCATCTGGGCCAAGATCCCAGAGACAGGGGCGCA |
| | | | CTTTCACCCCTCTCCGGCCATGGGCGGATTCGGACTCAAACACCCACCGC |
| | | | CCATGATGCTCATCAAGAACACGCCTGTGCCCGGAAATATCACCAGCTTC |
| | | | TCGGACGTGCCCGTCAGCAGCTTCATCACCCAGTACAGCACCGGGCAGGT |
| | | | CACCGTGGAGATGGAGTGGGAGCTCAAGAAGGAAAACTCCAAGAGGTGGA |
| | | | ACCCAGAGATCCAGTACACAAACAACTACAACGACCCCCAGTTTGTGGAC |
| | | | TTTGCCCCGGACAGCACCGGGGAATACAGAACCACCAGACCTATCGGAAC |
| | | | CCGATACCTTACCCGACCCCTTTAA |
| 215 | 54 | MAAP_aa | MIVVVLCCLVIAISDPSTGSIRESLSTRQTRSRESTTSRTTSSLRRETTP |
| | | | TSSTTTRTPSFRRSSPTTHPSGETSERQSFRPRKGFSNLLAWLKRVLRRP |
| | | | LPESG* |
| 216 | 54 | MAAP_nt | ATGATAGTCGTGGTCTTGTGCTGCCTGGTTATCGCTATCTCGGACCCTTC |
| | | | AACGGGCTCGATAAGGGAGAGCCTGTCAACGAGGCAGACGAGGTCGCGCG |
| | | | AGAGCACGACATCTCGTACAACGAGCAGCTTGAGGCGGGAGACAACCCCT |
| | | | ACCTCAAGTACAACCACGCGGACGCCGAGTTTCAGGAGAAGCTCGCCGAC |
| | | | GACACATCCTTCGGGGGAAACCTCGGAAAGGCAGTCTTTCAGGCCAAGAA |
| | | | AAGGGTTCTCGAACCTTTTGGCCTGGTTGAAGAGGGTGCTAAGACGGCCC |
| | | | CTACCGGAAAGCGGATAG |
| 217 | 55 | VP1_aa | MSFVDHPPDWLEEVGEGLREFLGLEAGPPKPKPNQQHDQARGLVLPGYNY |
| | | | LGPGNGLDRGEPVNAADEVAREHDISYNEQLEAGDNPYLKYNHADAEFQE |
| | | | KLADDTSFGGNLGKAVFQAKKRVLEPFGLVEEGAKTAPTGKRIDDHFPKR |
| | | | KKARTEEDSKPSTSSDAEAGPSGSQQLQIPAQPASSLGADTMSAGGGGPL |
| | | | GDNNQGADGVGNASGDWHCDSTWMGDRVVTKSTRTWVLPSYNNHQYREIK |
| | | | SGSVDGSNANAYFGYSTPWGYFDFNRFHSHWSPRDWQRLINNYWGFRPRS |
| | | | LRVKIFNIQVKEVTVQDSTTTIANNLTSTVQVFTDDDYQLPYVVGNGTEG |
| | | | CLPAFPPQVFTLPQYGYATLNRDNTENPTERSSFFCLEYFPSKMLRTGNN |
| | | | FEFTYNFEEVPFHSSFAPSQNLFKLANPLVDQYLYRFVSTNNTGGVQFNK |
| | | | NLAGRYANTYKNWFPGPMGRTQGWNLGSGVNRASVSAFATTNRMELEGAS |
| | | | YQVPPQPNGMTNNLQGSNTYALENTMIFNSQPANPGTTATYLEGNMLITS |
| | | | ESETQPVNRVAYNVGGQMATNNQSSTTAPATGTYNLQEIVPGSVWMERDV |
| | | | YLQGPIWAKIPETGAHFHPSPAMGGFGLKHPPPMMLIKNTPVPGNITSFS |
| | | | DVPVSSFITQYSTGQVTVEMEWELKKENSKRWNPEIQYTNNYNDPQFVDF |
| | | | APDSTGEYRTTRPIGTRYLTRPL* |
| 218 | 55 | VP1_nt | ATGTCTTTTGTTGATCACCCTCCAGATTGGTTGGAAGAAGTTGGTGAAGG |
| | | | TCTTCGCGAGTTTTTGGGCCTTGAAGCGGGCCCACCGAAACCAAAACCCA |
| | | | ATCAGCAGCATGATCAAGCCCGTGGTCTTGTGCTGCCTGGTTATAACTAT |
| | | | CTCGGACCCGGAAACGGGCTCGATCGAGGAGAGCCTGTCAACGCCGCAGA |
| | | | CGAGGTCGCGCGAGAGCACGACATCTCGTACAACGAGCAGCTTGAGGCGG |
| | | | GAGACAACCCCTACCTCAAGTACAACCACGCGGACGCCGAGTTTCAGGAG |
| | | | AAGCTCGCCGACGACACATCCTTCGGGGGAAACCTCGGAAAGGCAGTCTT |
| | | | TCAGGCCAAGAAAAGGGTTCTCGAACCTTTTGGCCTGGTTGAAGAGGGTG |
| | | | CTAAGACGGCCCCTACCGGAAAGCGGATAGACGACCACTTTCCAAAAAGA |
| | | | AAGAAGGCTCGGACCGAAGAGGACTCCAAGCCTTCCACCTCGTCAGACGC |
| | | | CGAAGCTGGACCCAGCGGATCCCAGCAGCTGCAAATCCCAGCCCAACCAG |
| | | | CCTCAAGTTTGGGAGCTGATACAATGTCTGCGGGAGGTGGCGGCCCATTG |
| | | | GGCGACAATAACCAAGGTGCCGATGGAGTGGGCAATGCCTCGGGAGATTG |
| | | | GCATTGCGATTCCACGTGGATGGGGGACAGAGTCGTCACCAAGTCCACCC |
| | | | GAACCTGGGTGCTGCCCAGCTACAACAACCACCAGTACCGAGAGATCAAA |
| | | | AGCGGCTCCGTCGACGGAAGCAACGCCAACGCCTACTTTGGATACAGCAC |
| | | | CCCCTGGGGGTACTTTGACTTTAACCGCTTCCACAGCCACTGGAGCCCCC |
| | | | GAGACTGGCAAAGACTCATCAACAACTACTGGGGCTTCAGACCCCGGTCC |
| | | | CTCAGAGTCAAAATCTTCAACATTCAAGTCAAAGAGGTCACGGTGCAGGA |
| | | | CTCCACCACCACCATCGCCAACAACCTCACCTCCACCGTCCAAGTGTTTA |
| | | | CGGACGACGACTACCAGCTGCCCTACGTCGTCGGCAACGGGACCGAGGGA |
| | | | TGCCTGCCGGCCTTCCCTCCGCAGGTCTTTACGCTGCCGCAGTACGGTTA |
| | | | CGCGACGCTGAACCGCGACAACACAGAAAATCCCACCGAGAGGAGCAGCT |
| | | | TCTTCTGCCTAGAGTACTTTCCCAGCAAGATGCTGAGAACGGGCAACAAC |
| | | | TTTGAGTTTACCTACAACTTTGAGGAGGTGCCCTTCCACTCCAGCTTCGC |
| | | | TCCCAGTCAGAACCTGTTCAAGCTGGCCAACCCGCTGGTGGACCAGTACT |
| | | | TGTACCGCTTCGTGAGCACAAATAACACTGGCGGAGTCCAGTTCAACAAG |
| | | | AACCTGGCCGGGAGATACGCCAACACCTACAAAAACTGGTTCCCGGGGCC |
| | | | CATGGGCCGAACCCAGGGCTGGAACCTGGGCTCCGGGGTCAACCGCGCCA |
| | | | GTGTCAGCGCCTTCGCCACGACCAATAGGATGGAGCTCGAGGGCGCGAGT |
| | | | TACCAGGTGCCCCCGCAGCCGAACGGCATGACCAACAACCTCCAGGGCAG |
| | | | CAACACCTATGCCCTGGAGAACACTATGATCTTCAACAGCCAGCCGGCGA |
| | | | ACCCGGGCACCACCGCCACGTACCTCGAGGGCAACATGCTCATCACCAGC |
| | | | GAGAGCGAGACACAGCCGGTGAACCGCGTGGCGTACAACGTCGGCGGGCA |
| | | | GATGGCCACCAACAACCAGAGCTCCACCACTGCCCCCGCGACCGGCACGT |
| | | | ACAACCTCCAGGAAATCGTGCCCGGCAGCGTGTGGATGGAGAGGGACGTG |
| | | | TACCTCCAAGGACCCATCTGGGCCAAGATCCCAGAGACAGGGGCGCACTT |
| | | | TCACCCCTCTCCGGCCATGGGCGGATTCGGACTCAAACACCCACCGCCCA |
| | | | TGATGCTCATCAAGAACACGCCTGTGCCCGGAAATATCACCAGCTTCTCG |
| | | | GACGTGCCCGTCAGCAGCTTCATCACCCAGTACAGCACCGGGCAGGTCAC |
| | | | CGTGGAGATGGAGTGGGAGCTCAAGAAGGAAAACTCCAAGAGGTGGAACC |
| | | | CAGAGATCCAGTACACAAACAACTACAACGACCCCCAGTTTGTGGACTTT |
| | | | GCCCCGGACAGCACCGGGGAATACAGAACCACCAGACCTATCGGAACCCG |
| | | | ATACCTTACCCGACCCCTTTAA |
| 219 | 55 | MAAP_aa | MIKPVVLCCLVITISDPETGSIEESLSTPQTRSRESTTSRTTSSLRRETT |
| | | | PTSSTTTRTPSFRRSSPTTHPSGETSERQSFRPRKGFSNLLAWLKRVLRR |
| | | | PLPESG* |
| 220 | 55 | MAAP_nt | ATGATCAAGCCCGTGGTCTTGTGCTGCCTGGTTATAACTATCTCGGACCC |
| | | | GGAAACGGGCTCGATCGAGGAGAGCCTGTCAACGCCGCAGACGAGGTCGC |
| | | | GCGAGAGCACGACATCTCGTACAACGAGCAGCTTGAGGCGGGAGACAACC |
| | | | CCTACCTCAAGTACAACCACGCGGACGCCGAGTTTCAGGAGAAGCTCGCC |
| | | | GACGACACATCCTTCGGGGGAAACCTCGGAAAGGCAGTCTTTCAGGCCAA |
| | | | GAAAAGGGTTCTCGAACCTTTTGGCCTGGTTGAAGAGGGTGCTAAGACGG |
| | | | CCCCTACCGGAAAGCGGATAG |
| 221 | 56 | VP1_aa | MSFVDHPPDWLEEVGEGLREFLGLEAGPPKPKPNQQHVDQARGLVLPGYN |
| | | | YLGPGNGLDRGEPVNRADEVAREHDISYNEQLEAGDNPYLKYNHADAEFQ |
| | | | EKLADDTSFGGNLGKAVFQAKKRVLEPFGLVEEGAKTAPTGKRIDDHFPK |
| | | | RKKARTEEDSKPSTSSDAEAGPSGSQQLQIPAQPASSLGADTMSAGGGGP |
| | | | LGDNNQGADGVGNASGDWHCDSTWMGDRVVTKSTRTWVLPSYNNHQYREI |
| | | | KSGSVDGSNANAYFGYSTPWGYFDFNRFHSHWSPRDWQRLINNYWGFRPR |
| | | | SLRVKIFNIQVKEVTVQDSTTTIANNLTSTVQVFTDDDYQLPYVVGNGTE |
| | | | GCLPAFPPQVFTLPQYGYATLNRDNTENPTERSSFFCLEYFPSKMLRTGN |
| | | | NFEFTYNFEEVPFHSSFAPSQNLFKLANPLVDQYLYRFVSTNNTGGVQFN |
| | | | KNLAGRYANTYKNWFPGPMGRTQGWNLGSGVNRASVSAFATTNRMELEGA |
| | | | SYQVPPQPNGMTNNLQGSNTYALENTMIFNSQPANPGTTATYLEGNMLIT |
| | | | SESETQPVNRVAYNVGGQMATNNQSSTTAPATGTYNLQEIVPGSVWMERD |
| | | | VYLQGPIWAKIPETGAHFHPSPAMGGFGLKHPPPMMLIKNTPVPGNITSF |
| | | | SDVPVSSFITQYSTGQVTVEMEWELKKENSKRWNPEIQYTNNYNDPQFVD |
| | | | FAPDSTGEYRTTRPIGTRYLTRPL* |
| 222 | 56 | VP1_nt | ATGTCTTTTGTTGATCACCCTCCAGATTGGTTGGAAGAAGTTGGTGAAGG |
| | | | TCTTCGCGAGTTTTTGGGCCTTGAAGCGGGCCCACCGAAACCAAAACCCA |
| | | | ATCAGCAGCATGTGGATCAAGCCCGTGGTCTTGTGCTGCCTGGTTATAAC |
| | | | TATCTCGGACCCGGAAACGGGCTCGATCGAGGAGAGCCTGTCAACAGGGC |
| | | | AGACGAGGTCGCGCGAGAGCACGACATCTCGTACAACGAGCAGCTTGAGG |
| | | | CGGGAGACAACCCCTACCTCAAGTACAACCACGCGGACGCCGAGTTTCAG |
| | | | GAGAAGCTCGCCGACGACACATCCTTCGGGGGAAACCTCGGAAAGGCAGT |
| | | | CTTTCAGGCCAAGAAAAGGGTTCTCGAACCTTTTGGCCTGGTTGAAGAGG |
| | | | GTGCTAAGACGGCCCCTACCGGAAAGCGGATAGACGACCACTTTCCAAAA |
| | | | AGAAAGAAGGCTCGGACCGAAGAGGACTCCAAGCCTTCCACCTCGTCAGA |
| | | | CGCCGAAGCTGGACCCAGCGGATCCCAGCAGCTGCAAATCCCAGCCCAAC |
| | | | CAGCCTCAAGTTTGGGAGCTGATACAATGTCTGCGGGAGGTGGCGGCCCA |
| | | | TTGGGCGACAATAACCAAGGTGCCGATGGAGTGGGCAATGCCTCGGGAGA |
| | | | TTGGCATTGCGATTCCACGTGGATGGGGGACAGAGTCGTCACCAAGTCCA |
| | | | CCCGAACCTGGGTGCTGCCCAGCTACAACAACCACCAGTACCGAGAGATC |
| | | | AAAAGCGGCTCCGTCGACGGAAGCAACGCCAACGCCTACTTTGGATACAG |
| | | | CACCCCCTGGGGGTACTTTGACTTTAACCGCTTCCACAGCCACTGGAGCC |
| | | | CCCGAGACTGGCAAAGACTCATCAACAACTACTGGGGCTTCAGACCCCGG |
| | | | TCCCTCAGAGTCAAAATCTTCAACATTCAAGTCAAAGAGGTCACGGTGCA |
| | | | GGACTCCACCACCACCATCGCCAACAACCTCACCTCCACCGTCCAAGTGT |
| | | | TTACGGACGACGACTACCAGCTGCCCTACGTCGTCGGCAACGGGACCGAG |
| | | | GGATGCCTGCCGGCCTTCCCTCCGCAGGTCTTTACGCTGCCGCAGTACGG |
| | | | TTACGCGACGCTGAACCGCGACAACACAGAAAATCCCACCGAGAGGAGCA |
| | | | GCTTCTTCTGCCTAGAGTACTTTCCCAGCAAGATGCTGAGAACGGGCAAC |
| | | | AACTTTGAGTTTACCTACAACTTTGAGGAGGTGCCCTTCCACTCCAGCTT |
| | | | CGCTCCCAGTCAGAACCTGTTCAAGCTGGCCAACCCGCTGGTGGACCAGT |
| | | | ACTTGTACCGCTTCGTGAGCACAAATAACACTGGCGGAGTCCAGTTCAAC |
| | | | AAGAACCTGGCCGGGAGATACGCCAACACCTACAAAAACTGGTTCCCGGG |
| | | | GCCCATGGGCCGAACCCAGGGCTGGAACCTGGGCTCCGGGGTCAACCGCG |
| | | | CCAGTGTCAGCGCCTTCGCCACGACCAATAGGATGGAGCTCGAGGGCGCG |
| | | | AGTTACCAGGTGCCCCCGCAGCCGAACGGCATGACCAACAACCTCCAGGG |
| | | | CAGCAACACCTATGCCCTGGAGAACACTATGATCTTCAACAGCCAGCCGG |
| | | | CGAACCCGGGCACCACCGCCACGTACCTCGAGGGCAACATGCTCATCACC |
| | | | AGCGAGAGCGAGACACAGCCGGTGAACCGCGTGGCGTACAACGTCGGCGG |
| | | | GCAGATGGCCACCAACAACCAGAGCTCCACCACTGCCCCCGCGACCGGCA |
| | | | CGTACAACCTCCAGGAAATCGTGCCCGGCAGCGTGTGGATGGAGAGGGAC |
| | | | GTGTACCTCCAAGGACCCATCTGGGCCAAGATCCCAGAGACAGGGGCGCA |
| | | | CTTTCACCCCTCTCCGGCCATGGGCGGATTCGGACTCAAACACCCACCGC |
| | | | CCATGATGCTCATCAAGAACACGCCTGTGCCCGGAAATATCACCAGCTTC |
| | | | TCGGACGTGCCCGTCAGCAGCTTCATCACCCAGTACAGCACCGGGCAGGT |
| | | | CACCGTGGAGATGGAGTGGGAGCTCAAGAAGGAAAACTCCAAGAGGTGGA |
| | | | ACCCAGAGATCCAGTACACAAACAACTACAACGACCCCCAGTTTGTGGAC |
| | | | TTTGCCCCGGACAGCACCGGGGAATACAGAACCACCAGACCTATCGGAAC |
| | | | CCGATACCTTACCCGACCCCTTTAA |
| 223 | 56 | MAAP_aa | MWIKPVVLCCLVITISDPETGSIEESLSTGQTRSRESTTSRTTSSLRRET |
| | | | TPTSSTTTRTPSFRRSSPTTHPSGETSERQSFRPRKGFSNLLAWLKRVLR |
| | | | RPLPESG* |
| 224 | 56 | MAAP_nt | ATGTGGATCAAGCCCGTGGTCTTGTGCTGCCTGGTTATAACTATCTCGGA |
| | | | CCCGGAAACGGGCTCGATCGAGGAGAGCCTGTCAACAGGGCAGACGAGGT |
| | | | CGCGCGAGAGCACGACATCTCGTACAACGAGCAGCTTGAGGCGGGAGACA |
| | | | ACCCCTACCTCAAGTACAACCACGCGGACGCCGAGTTTCAGGAGAAGCTC |
| | | | GCCGACGACACATCCTTCGGGGGAAACCTCGGAAAGGCAGTCTTTCAGGC |
| | | | CAAGAAAAGGGTTCTCGAACCTTTTGGCCTGGTTGAAGAGGGTGCTAAGA |
| | | | CGGCCCCTACCGGAAAGCGGATAG |
| 225 | 57 | VP1_aa | MSFVDHPPDWLEEVGEGLREFLGLEAGPPKPKPNQQKQDARGLVLPGYKY |
| | | | LGPFNGLDRGEPVNRADEVAREHDISYNEQLEAGDNPYLKYNHADAEFQE |
| | | | KLADDTSFGGNLGKAVFQAKKRVLEPFGLVEEGAKTAPTGKRIDDHFPKR |
| | | | KKARTEEDSKPSTSSDAEAGPSGSQQLQIPAQPASSLGADTMSAGGGGPL |
| | | | GDNNQGADGVGNASGDWHCDSTWMGDRVVTKSTRTWVLPSYNNHQYREIK |
| | | | SGSVDGSNANAYFGYSTPWGYFDFNRFHSHWSPRDWQRLINNYWGFRPRS |
| | | | LRVKIFNIQVKEVTVQDSTTTIANNLTSTVQVFTDDDYQLPYVVGNGTEG |
| | | | CLPAFPPQVFTLPQYGYATLNRDNTENPTERSSFFCLEYFPSKMLRTGNN |
| | | | FEFTYNFEEVPFHSSFAPSQNLFKLANPLVDQYLYRFVSTNNTGGVQFNK |
| | | | NLAGRYANTYKNWFPGPMGRTQGWNLGSGVNRASVSAFATTNRMELEGAS |
| | | | YQVPPQPNGMTNNLQGSNTYALENTMIFNSQPANPGTTATYLEGNMLITS |
| | | | ESETQPVNRVAYNVGGQMATNNQSSTTAPATGTYNLQEIVPGSVWMERDV |
| | | | YLQGPIWAKIPETGAHFHPSPAMGGFGLKHPPPMMLIKNTPVPGNITSFS |
| | | | DVPVSSFITQYSTGQVTVEMEWELKKENSKRWNPEIQYTNNYNDPQFVDF |
| | | | APDSTGEYRTTRPIGTRYLTRPL* |
| 226 | 57 | VP1_nt | ATGTCTTTTGTTGATCACCCTCCAGATTGGTTGGAAGAAGTTGGTGAAGG |
| | | | TCTTCGCGAGTTTTTGGGCCTTGAAGCGGGCCCACCGAAACCAAAACCCA |
| | | | ATCAGCAGAAGCAAGATGCCCGTGGTCTTGTGCTGCCTGGTTATAAATAT |
| | | | CTCGGACCCTTCAACGGGCTCGATCGAGGAGAGCCTGTCAACAGGGCAGA |
| | | | CGAGGTCGCGCGAGAGCACGACATCTCGTACAACGAGCAGCTTGAGGCGG |
| | | | GAGACAACCCCTACCTCAAGTACAACCACGCGGACGCCGAGTTTCAGGAG |
| | | | AAGCTCGCCGACGACACATCCTTCGGGGGAAACCTCGGAAAGGCAGTCTT |
| | | | TCAGGCCAAGAAAAGGGTTCTCGAACCTTTTGGCCTGGTTGAAGAGGGTG |
| | | | CTAAGACGGCCCCTACCGGAAAGCGGATAGACGACCACTTTCCAAAAAGA |
| | | | AAGAAGGCTCGGACCGAAGAGGACTCCAAGCCTTCCACCTCGTCAGACGC |
| | | | CGAAGCTGGACCCAGCGGATCCCAGCAGCTGCAAATCCCAGCCCAACCAG |
| | | | CCTCAAGTTTGGGAGCTGATACAATGTCTGCGGGAGGTGGCGGCCCATTG |
| | | | GGCGACAATAACCAAGGTGCCGATGGAGTGGGCAATGCCTCGGGAGATTG |
| | | | GCATTGCGATTCCACGTGGATGGGGGACAGAGTCGTCACCAAGTCCACCC |
| | | | GAACCTGGGTGCTGCCCAGCTACAACAACCACCAGTACCGAGAGATCAAA |
| | | | AGCGGCTCCGTCGACGGAAGCAACGCCAACGCCTACTTTGGATACAGCAC |
| | | | CCCCTGGGGGTACTTTGACTTTAACCGCTTCCACAGCCACTGGAGCCCCC |
| | | | GAGACTGGCAAAGACTCATCAACAACTACTGGGGCTTCAGACCCCGGTCC |
| | | | CTCAGAGTCAAAATCTTCAACATTCAAGTCAAAGAGGTCACGGTGCAGGA |
| | | | CTCCACCACCACCATCGCCAACAACCTCACCTCCACCGTCCAAGTGTTTA |
| | | | CGGACGACGACTACCAGCTGCCCTACGTCGTCGGCAACGGGACCGAGGGA |
| | | | TGCCTGCCGGCCTTCCCTCCGCAGGTCTTTACGCTGCCGCAGTACGGTTA |
| | | | CGCGACGCTGAACCGCGACAACACAGAAAATCCCACCGAGAGGAGCAGCT |
| | | | TCTTCTGCCTAGAGTACTTTCCCAGCAAGATGCTGAGAACGGGCAACAAC |
| | | | TTTGAGTTTACCTACAACTTTGAGGAGGTGCCCTTCCACTCCAGCTTCGC |
| | | | TCCCAGTCAGAACCTGTTCAAGCTGGCCAACCCGCTGGTGGACCAGTACT |
| | | | TGTACCGCTTCGTGAGCACAAATAACACTGGCGGAGTCCAGTTCAACAAG |
| | | | AACCTGGCCGGGAGATACGCCAACACCTACAAAAACTGGTTCCCGGGGCC |
| | | | CATGGGCCGAACCCAGGGCTGGAACCTGGGCTCCGGGGTCAACCGCGCCA |
| | | | GTGTCAGCGCCTTCGCCACGACCAATAGGATGGAGCTCGAGGGCGCGAGT |
| | | | TACCAGGTGCCCCCGCAGCCGAACGGCATGACCAACAACCTCCAGGGCAG |
| | | | CAACACCTATGCCCTGGAGAACACTATGATCTTCAACAGCCAGCCGGCGA |
| | | | ACCCGGGCACCACCGCCACGTACCTCGAGGGCAACATGCTCATCACCAGC |
| | | | GAGAGCGAGACACAGCCGGTGAACCGCGTGGCGTACAACGTCGGCGGGCA |
| | | | GATGGCCACCAACAACCAGAGCTCCACCACTGCCCCCGCGACCGGCACGT |
| | | | ACAACCTCCAGGAAATCGTGCCCGGCAGCGTGTGGATGGAGAGGGACGTG |
| | | | TACCTCCAAGGACCCATCTGGGCCAAGATCCCAGAGACAGGGGCGCACTT |
| | | | TCACCCCTCTCCGGCCATGGGCGGATTCGGACTCAAACACCCACCGCCCA |
| | | | TGATGCTCATCAAGAACACGCCTGTGCCCGGAAATATCACCAGCTTCTCG |
| | | | GACGTGCCCGTCAGCAGCTTCATCACCCAGTACAGCACCGGGCAGGTCAC |
| | | | CGTGGAGATGGAGTGGGAGCTCAAGAAGGAAAACTCCAAGAGGTGGAACC |
| | | | CAGAGATCCAGTACACAAACAACTACAACGACCCCCAGTTTGTGGACTTT |
| | | | GCCCCGGACAGCACCGGGGAATACAGAACCACCAGACCTATCGGAACCCG |
| | | | ATACCTTACCCGACCCCTTTAA |
| 227 | 57 | MAAP_aa | MPVVLCCLVINISDPSTGSIEESLSTGQTRSRESTTSRTTSSLRRETTPT |
| | | | SSTTTRTPSFRRSSPTTHPSGETSERQSFRPRKGFSNLLAWLKRVLRRPL |
| | | | PESG* |
| 228 | 57 | MAAP_nt | ATGCCCGTGGTCTTGTGCTGCCTGGTTATAAATATCTCGGACCCTTCAAC |
| | | | GGGCTCGATCGAGGAGAGCCTGTCAACAGGGCAGACGAGGTCGCGCGAGA |
| | | | GCACGACATCTCGTACAACGAGCAGCTTGAGGCGGGAGACAACCCCTACC |
| | | | TCAAGTACAACCACGCGGACGCCGAGTTTCAGGAGAAGCTCGCCGACGAC |
| | | | ACATCCTTCGGGGGAAACCTCGGAAAGGCAGTCTTTCAGGCCAAGAAAAG |
| | | | GGTTCTCGAACCTTTTGGCCTGGTTGAAGAGGGTGCTAAGACGGCCCCTA |
| | | | CCGGAAAGCGGATAG |
| 229 | 58 | VP1_aa | MSFVDHPPDWLEEVGEGLREFLGLEAGPPKPKPNQQHDQDQARGLVLPGY |
| | | | NYLGPGNGLDRGEPVNRADEVAREHDISYNEQLEAGDNPYLKYNHADAEF |
| | | | QEKLADDTSFGGNLGKAVFQAKKRVLEPFGLVEEGAKTAPTGKRIDDHFP |
| | | | KRKKARTEEDSKPSTSSDAEAGPSGSQQLQIPAQPASSLGADTMSAGGGG |
| | | | PLGDNNQGADGVGNASGDWHCDSTWMGDRVVTKSTRTWVLPSYNNHQYRE |
| | | | IKSGSVDGSNANAYFGYSTPWGYFDFNRFHSHWSPRDWQRLINNYWGFRP |
| | | | RSLRVKIFNIQVKEVTVQDSTTTIANNLTSTVQVFTDDDYQLPYVVGNGT |
| | | | EGCLPAFPPQVFTLPQYGYATLNRDNTENPTERSSFFCLEYFPSKMLRTG |
| | | | NNFEFTYNFEEVPFHSSFAPSQNLFKLANPLVDQYLYRFVSTNNTGGVQF |
| | | | NKNLAGRYANTYKNWFPGPMGRTQGWNLGSGVNRASVSAFATTNRMELEG |
| | | | ASYQVPPQPNGMTNNLQGSNTYALENTMIFNSQPANPGTTATYLEGNMLI |
| | | | TSESETQPVNRVAYNVGGQMATNNQSSTTAPATGTYNLQEIVPGSVWMER |
| | | | DVYLQGPIWAKIPETGAHFHPSPAMGGFGLKHPPPMMLIKNTPVPGNITS |
| | | | FSDVPVSSFITQYSTGQVTVEMEWELKKENSKRWNPEIQYTNNYNDPQFV |
| | | | DFAPDSTGEYRTTRPIGTRYLTRPL* |
| 230 | 58 | VP1_nt | ATGTCTTTTGTTGATCACCCTCCAGATTGGTTGGAAGAAGTTGGTGAAGG |
| | | | TCTTCGCGAGTTTTTGGGCCTTGAAGCGGGCCCACCGAAACCAAAACCCA |
| | | | ATCAGCAGCATGACCAAGATCAAGCCCGTGGTCTTGTGCTGCCTGGTTAT |
| | | | AACTATCTCGGACCCGGAAACGGGCTCGATCGAGGAGAGCCTGTCAACAG |
| | | | GGCAGACGAGGTCGCGCGAGAGCACGACATCTCGTACAACGAGCAGCTTG |
| | | | AGGCGGGAGACAACCCCTACCTCAAGTACAACCACGCGGACGCCGAGTTT |
| | | | CAGGAGAAGCTCGCCGACGACACATCCTTCGGGGGAAACCTCGGAAAGGC |
| | | | AGTCTTTCAGGCCAAGAAAAGGGTTCTCGAACCTTTTGGCCTGGTTGAAG |
| | | | AGGGTGCTAAGACGGCCCCTACCGGAAAGCGGATAGACGACCACTTTCCA |
| | | | AAAAGAAAGAAGGCTCGGACCGAAGAGGACTCCAAGCCTTCCACCTCGTC |
| | | | AGACGCCGAAGCTGGACCCAGCGGATCCCAGCAGCTGCAAATCCCAGCCC |
| | | | AACCAGCCTCAAGTTTGGGAGCTGATACAATGTCTGCGGGAGGTGGCGGC |
| | | | CCATTGGGCGACAATAACCAAGGTGCCGATGGAGTGGGCAATGCCTCGGG |
| | | | AGATTGGCATTGCGATTCCACGTGGATGGGGGACAGAGTCGTCACCAAGT |
| | | | CCACCCGAACCTGGGTGCTGCCCAGCTACAACAACCACCAGTACCGAGAG |
| | | | ATCAAAAGCGGCTCCGTCGACGGAAGCAACGCCAACGCCTACTTTGGATA |
| | | | CAGCACCCCCTGGGGGTACTTTGACTTTAACCGCTTCCACAGCCACTGGA |
| | | | GCCCCCGAGACTGGCAAAGACTCATCAACAACTACTGGGGCTTCAGACCC |
| | | | CGGTCCCTCAGAGTCAAAATCTTCAACATTCAAGTCAAAGAGGTCACGGT |
| | | | GCAGGACTCCACCACCACCATCGCCAACAACCTCACCTCCACCGTCCAAG |
| | | | TGTTTACGGACGACGACTACCAGCTGCCCTACGTCGTCGGCAACGGGACC |
| | | | GAGGGATGCCTGCCGGCCTTCCCTCCGCAGGTCTTTACGCTGCCGCAGTA |
| | | | CGGTTACGCGACGCTGAACCGCGACAACACAGAAAATCCCACCGAGAGGA |
| | | | GCAGCTTCTTCTGCCTAGAGTACTTTCCCAGCAAGATGCTGAGAACGGGC |
| | | | AACAACTTTGAGTTTACCTACAACTTTGAGGAGGTGCCCTTCCACTCCAG |
| | | | CTTCGCTCCCAGTCAGAACCTGTTCAAGCTGGCCAACCCGCTGGTGGACC |
| | | | AGTACTTGTACCGCTTCGTGAGCACAAATAACACTGGCGGAGTCCAGTTC |
| | | | AACAAGAACCTGGCCGGGAGATACGCCAACACCTACAAAAACTGGTTCCC |
| | | | GGGGCCCATGGGCCGAACCCAGGGCTGGAACCTGGGCTCCGGGGTCAACC |
| | | | GCGCCAGTGTCAGCGCCTTCGCCACGACCAATAGGATGGAGCTCGAGGGC |
| | | | GCGAGTTACCAGGTGCCCCCGCAGCCGAACGGCATGACCAACAACCTCCA |
| | | | GGGCAGCAACACCTATGCCCTGGAGAACACTATGATCTTCAACAGCCAGC |
| | | | CGGCGAACCCGGGCACCACCGCCACGTACCTCGAGGGCAACATGCTCATC |
| | | | ACCAGCGAGAGCGAGACACAGCCGGTGAACCGCGTGGCGTACAACGTCGG |
| | | | CGGGCAGATGGCCACCAACAACCAGAGCTCCACCACTGCCCCCGCGACCG |
| | | | GCACGTACAACCTCCAGGAAATCGTGCCCGGCAGCGTGTGGATGGAGAGG |
| | | | GACGTGTACCTCCAAGGACCCATCTGGGCCAAGATCCCAGAGACAGGGGC |
| | | | GCACTTTCACCCCTCTCCGGCCATGGGCGGATTCGGACTCAAACACCCAC |
| | | | CGCCCATGATGCTCATCAAGAACACGCCTGTGCCCGGAAATATCACCAGC |
| | | | TTCTCGGACGTGCCCGTCAGCAGCTTCATCACCCAGTACAGCACCGGGCA |
| | | | GGTCACCGTGGAGATGGAGTGGGAGCTCAAGAAGGAAAACTCCAAGAGGT |
| | | | GGAACCCAGAGATCCAGTACACAAACAACTACAACGACCCCCAGTTTGTG |
| | | | GACTTTGCCCCGGACAGCACCGGGGAATACAGAACCACCAGACCTATCGG |
| | | | AACCCGATACCTTACCCGACCCCTTTAA |
| 231 | 58 | MAAP_aa | MTKIKPVVLCCLVITISDPETGSIEESLSTGQTRSRESTTSRTTSSLRRE |
| | | | TTPTSSTTTRTPSFRRSSPTTHPSGETSERQSFRPRKGFSNLLAWLKRVL |
| | | | RRPLPESG* |
| 232 | 58 | MAAP_nt | ATGACCAAGATCAAGCCCGTGGTCTTGTGCTGCCTGGTTATAACTATCTC |
| | | | GGACCCGGAAACGGGCTCGATCGAGGAGAGCCTGTCAACAGGGCAGACGA |
| | | | GGTCGCGCGAGAGCACGACATCTCGTACAACGAGCAGCTTGAGGCGGGAG |
| | | | ACAACCCCTACCTCAAGTACAACCACGCGGACGCCGAGTTTCAGGAGAAG |
| | | | CTCGCCGACGACACATCCTTCGGGGGAAACCTCGGAAAGGCAGTCTTTCA |
| | | | GGCCAAGAAAAGGGTTCTCGAACCTTTTGGCCTGGTTGAAGAGGGTGCTA |
| | | | AGACGGCCCCTACCGGAAAGCGGATAG |
| 233 | 59 | VP1_aa | MSFVDHPPDWLEEVGEGLREFLGLEAGPPKPKPNEQHQDQARGLVLPGYK |
| | | | YLGPFNGLDRGEPVNRADEVAREHDISYNEQLEAGDNPYLKYNHADAEFQ |
| | | | EKLADDTSFGGNLGKAVFQAKKRVLEPFGLVEEGAKTAPTGKRIDDHFPK |
| | | | RKKARTEEDSKPSTSSDAEAGPSGSQQLQIPAQPASSLGADTMSAGGGGP |
| | | | LGDNNQGADGVGNASGDWHCDSTWMGDRVVTKSTRTWVLPSYNNHQYREI |
| | | | KSGSVDGSNANAYFGYSTPWGYFDFNRFHSHWSPRDWQRLINNYWGFRPR |
| | | | SLRVKIFNIQVKEVTVQDSTTTIANNLTSTVQVFTDDDYQLPYVVGNGTE |
| | | | GCLPAFPPQVFTLPQYGYATLNRDNTENPTERSSFFCLEYFPSKMLRTGN |
| | | | NFEFTYNFEEVPFHSSFAPSQNLFKLANPLVDQYLYRFVSTNNTGGVQFN |
| | | | KNLAGRYANTYKNWFPGPMGRTQGWNLGSGVNRASVSAFATTNRMELEGA |
| | | | SYQVPPQPNGMTNNLQGSNTYALENTMIFNSQPANPGTTATYLEGNMLIT |
| | | | SESETQPVNRVAYNVGGQMATNNQSSTTAPATGTYNLQEIVPGSVWMERD |
| | | | VYLQGPIWAKIPETGAHFHPSPAMGGFGLKHPPPMMLIKNTPVPGNITSF |
| | | | SDVPVSSFITQYSTGQVTVEMEWELKKENSKRWNPEIQYTNNYNDPQFVD |
| | | | FAPDSTGEYRTTRPIGTRYLTRPL* |
| 234 | 59 | VP1_nt | ATGTCTTTTGTTGATCACCCTCCAGATTGGTTGGAAGAAGTTGGTGAAGG |
| | | | TCTTCGCGAGTTTTTGGGCCTTGAAGCGGGCCCACCGAAACCAAAACCCA |
| | | | ATGAACAGCATCAAGATCAAGCCCGTGGTCTTGTGCTGCCTGGTTATAAA |
| | | | TATCTCGGACCCTTCAACGGGCTCGATCGAGGAGAGCCTGTCAACAGGGC |
| | | | AGACGAGGTCGCGCGAGAGCACGACATCTCGTACAACGAGCAGCTTGAGG |
| | | | CGGGAGACAACCCCTACCTCAAGTACAACCACGCGGACGCCGAGTTTCAG |
| | | | GAGAAGCTCGCCGACGACACATCCTTCGGGGGAAACCTCGGAAAGGCAGT |
| | | | CTTTCAGGCCAAGAAAAGGGTTCTCGAACCTTTTGGCCTGGTTGAAGAGG |
| | | | GTGCTAAGACGGCCCCTACCGGAAAGCGGATAGACGACCACTTTCCAAAA |
| | | | AGAAAGAAGGCTCGGACCGAAGAGGACTCCAAGCCTTCCACCTCGTCAGA |
| | | | CGCCGAAGCTGGACCCAGCGGATCCCAGCAGCTGCAAATCCCAGCCCAAC |
| | | | CAGCCTCAAGTTTGGGAGCTGATACAATGTCTGCGGGAGGTGGCGGCCCA |
| | | | TTGGGCGACAATAACCAAGGTGCCGATGGAGTGGGCAATGCCTCGGGAGA |
| | | | TTGGCATTGCGATTCCACGTGGATGGGGGACAGAGTCGTCACCAAGTCCA |
| | | | CCCGAACCTGGGTGCTGCCCAGCTACAACAACCACCAGTACCGAGAGATC |
| | | | AAAAGCGGCTCCGTCGACGGAAGCAACGCCAACGCCTACTTTGGATACAG |
| | | | CACCCCCTGGGGGTACTTTGACTTTAACCGCTTCCACAGCCACTGGAGCC |
| | | | CCCGAGACTGGCAAAGACTCATCAACAACTACTGGGGCTTCAGACCCCGG |
| | | | TCCCTCAGAGTCAAAATCTTCAACATTCAAGTCAAAGAGGTCACGGTGCA |
| | | | GGACTCCACCACCACCATCGCCAACAACCTCACCTCCACCGTCCAAGTGT |
| | | | TTACGGACGACGACTACCAGCTGCCCTACGTCGTCGGCAACGGGACCGAG |
| | | | GGATGCCTGCCGGCCTTCCCTCCGCAGGTCTTTACGCTGCCGCAGTACGG |
| | | | TTACGCGACGCTGAACCGCGACAACACAGAAAATCCCACCGAGAGGAGCA |
| | | | GCTTCTTCTGCCTAGAGTACTTTCCCAGCAAGATGCTGAGAACGGGCAAC |
| | | | AACTTTGAGTTTACCTACAACTTTGAGGAGGTGCCCTTCCACTCCAGCTT |
| | | | CGCTCCCAGTCAGAACCTGTTCAAGCTGGCCAACCCGCTGGTGGACCAGT |
| | | | ACTTGTACCGCTTCGTGAGCACAAATAACACTGGCGGAGTCCAGTTCAAC |
| | | | AAGAACCTGGCCGGGAGATACGCCAACACCTACAAAAACTGGTTCCCGGG |
| | | | GCCCATGGGCCGAACCCAGGGCTGGAACCTGGGCTCCGGGGTCAACCGCG |
| | | | CCAGTGTCAGCGCCTTCGCCACGACCAATAGGATGGAGCTCGAGGGCGCG |
| | | | AGTTACCAGGTGCCCCCGCAGCCGAACGGCATGACCAACAACCTCCAGGG |
| | | | CAGCAACACCTATGCCCTGGAGAACACTATGATCTTCAACAGCCAGCCGG |
| | | | CGAACCCGGGCACCACCGCCACGTACCTCGAGGGCAACATGCTCATCACC |
| | | | AGCGAGAGCGAGACACAGCCGGTGAACCGCGTGGCGTACAACGTCGGCGG |
| | | | GCAGATGGCCACCAACAACCAGAGCTCCACCACTGCCCCCGCGACCGGCA |
| | | | CGTACAACCTCCAGGAAATCGTGCCCGGCAGCGTGTGGATGGAGAGGGAC |
| | | | GTGTACCTCCAAGGACCCATCTGGGCCAAGATCCCAGAGACAGGGGCGCA |
| | | | CTTTCACCCCTCTCCGGCCATGGGCGGATTCGGACTCAAACACCCACCGC |
| | | | CCATGATGCTCATCAAGAACACGCCTGTGCCCGGAAATATCACCAGCTTC |
| | | | TCGGACGTGCCCGTCAGCAGCTTCATCACCCAGTACAGCACCGGGCAGGT |
| | | | CACCGTGGAGATGGAGTGGGAGCTCAAGAAGGAAAACTCCAAGAGGTGGA |
| | | | ACCCAGAGATCCAGTACACAAACAACTACAACGACCCCCAGTTTGTGGAC |
| | | | TTTGCCCCGGACAGCACCGGGGAATACAGAACCACCAGACCTATCGGAAC |
| | | | CCGATACCTTACCCGACCCCTTTAA |
| 235 | 59 | MAAP_aa | MNSIKIKPVVLCCLVINISDPSTGSIEESLSTGQTRSRESTTSRTTSSLR |
| | | | RETTPTSSTTTRTPSFRRSSPTTHPSGETSERQSFRPRKGFSNLLAWLKR |
| | | | VLRRPLPESG* |
| 236 | 59 | MAAP_nt | ATGAACAGCATCAAGATCAAGCCCGTGGTCTTGTGCTGCCTGGTTATAAA |
| | | | TATCTCGGACCCTTCAACGGGCTCGATCGAGGAGAGCCTGTCAACAGGGC |
| | | | AGACGAGGTCGCGCGAGAGCACGACATCTCGTACAACGAGCAGCTTGAGG |
| | | | CGGGAGACAACCCCTACCTCAAGTACAACCACGCGGACGCCGAGTTTCAG |
| | | | GAGAAGCTCGCCGACGACACATCCTTCGGGGGAAACCTCGGAAAGGCAGT |
| | | | CTTTCAGGCCAAGAAAAGGGTTCTCGAACCTTTTGGCCTGGTTGAAGAGG |
| | | | GTGCTAAGACGGCCCCTACCGGAAAGCGGATAG |
| 237 | 60 | VP1_aa | MSFVDHPPDWLEEVGEGLREFLGLEAGPPKPKPNQQHQDQARGLVLPGYN |
| | | | YLGPGNGLDRGEPVNRADAVAREHDKAYDEQLKAGDNPYLKYNHADAEFQ |
| | | | EKLADDTSFGGNLGKAVFQAKKRVLEPFGLVEEGAKTAPTGKRIDDHFPK |
| | | | RKKARTEEDSKPSTSSDAEAGPSGSQQLQIPAQPASSLGADTMSAGGGGP |
| | | | LGDNNQGADGVGNASGDWHCDSTWMGDRVVTKSTRTWVLPSYNNHQYREI |
| | | | KSGSVDGSNANAYFGYSTPWGYFDFNRFHSHWSPRDWQRLINNYWGFRPR |
| | | | SLRVKIFNIQVKEVTVQDSTTTIANNLTSTVQVFTDDDYQLPYVVGNGTE |
| | | | GCLPAFPPQVFTLPQYGYATLNRDNTENPTERSSFFCLEYFPSKMLRTGN |
| | | | NFEFTYNFEEVPFHSSFAPSQNLFKLANPLVDQYLYRFVSTNNTGGVQFN |
| | | | KNLAGRYANTYKNWFPGPMGRTQGWNLGSGVNRASVSAFATTNRMELEGA |
| | | | SYQVPPQPNGMTNNLQGSNTYALENTMIFNSQPANPGTTATYLEGNMLIT |
| | | | SESETQPVNRVAYNVGGQMATNNQSSTTAPATGTYNLQEIVPGSVWMERD |
| | | | VYLQGPIWAKIPETGAHFHPSPAMGGFGLKHPPPMMLIKNTPVPGNITSF |
| | | | SDVPVSSFITQYSTGQVTVEMEWELKKENSKRWNPEIQYTNNYNDPQFVD |
| | | | FAPDSTGEYRTTRPIGTRYLTRPL* |
| 238 | 60 | VP1_nt | ATGTCTTTTGTTGATCACCCTCCAGATTGGTTGGAAGAAGTTGGTGAAGG |
| | | | TCTTCGCGAGTTTTTGGGCCTTGAAGCGGGCCCACCGAAACCAAAACCCA |
| | | | ATCAGCAGCATCAAGATCAAGCCCGTGGTCTTGTGCTGCCTGGTTATAAC |
| | | | TATCTCGGACCCGGAAACGGGCTCGATCGAGGAGAGCCTGTCAACAGGGC |
| | | | AGACGCCGTCGCGCGAGAGCACGACAAAGCATACGATGAGCAGCTTAAAG |
| | | | CGGGAGACAACCCCTACCTCAAGTACAACCACGCGGACGCCGAGTTTCAG |
| | | | GAGAAGCTCGCCGACGACACATCCTTCGGGGGAAACCTCGGAAAGGCAGT |
| | | | CTTTCAGGCCAAGAAAAGGGTTCTCGAACCTTTTGGCCTGGTTGAAGAGG |
| | | | GTGCTAAGACGGCCCCTACCGGAAAGCGGATAGACGACCACTTTCCAAAA |
| | | | AGAAAGAAGGCTCGGACCGAAGAGGACTCCAAGCCTTCCACCTCGTCAGA |
| | | | CGCCGAAGCTGGACCCAGCGGATCCCAGCAGCTGCAAATCCCAGCCCAAC |
| | | | CAGCCTCAAGTTTGGGAGCTGATACAATGTCTGCGGGAGGTGGCGGCCCA |
| | | | TTGGGCGACAATAACCAAGGTGCCGATGGAGTGGGCAATGCCTCGGGAGA |
| | | | TTGGCATTGCGATTCCACGTGGATGGGGGACAGAGTCGTCACCAAGTCCA |
| | | | CCCGAACCTGGGTGCTGCCCAGCTACAACAACCACCAGTACCGAGAGATC |
| | | | AAAAGCGGCTCCGTCGACGGAAGCAACGCCAACGCCTACTTTGGATACAG |
| | | | CACCCCCTGGGGGTACTTTGACTTTAACCGCTTCCACAGCCACTGGAGCC |
| | | | CCCGAGACTGGCAAAGACTCATCAACAACTACTGGGGCTTCAGACCCCGG |
| | | | TCCCTCAGAGTCAAAATCTTCAACATTCAAGTCAAAGAGGTCACGGTGCA |
| | | | GGACTCCACCACCACCATCGCCAACAACCTCACCTCCACCGTCCAAGTGT |
| | | | TTACGGACGACGACTACCAGCTGCCCTACGTCGTCGGCAACGGGACCGAG |
| | | | GGATGCCTGCCGGCCTTCCCTCCGCAGGTCTTTACGCTGCCGCAGTACGG |
| | | | TTACGCGACGCTGAACCGCGACAACACAGAAAATCCCACCGAGAGGAGCA |
| | | | GCTTCTTCTGCCTAGAGTACTTTCCCAGCAAGATGCTGAGAACGGGCAAC |
| | | | AACTTTGAGTTTACCTACAACTTTGAGGAGGTGCCCTTCCACTCCAGCTT |
| | | | CGCTCCCAGTCAGAACCTGTTCAAGCTGGCCAACCCGCTGGTGGACCAGT |
| | | | ACTTGTACCGCTTCGTGAGCACAAATAACACTGGCGGAGTCCAGTTCAAC |
| | | | AAGAACCTGGCCGGGAGATACGCCAACACCTACAAAAACTGGTTCCCGGG |
| | | | GCCCATGGGCCGAACCCAGGGCTGGAACCTGGGCTCCGGGGTCAACCGCG |
| | | | CCAGTGTCAGCGCCTTCGCCACGACCAATAGGATGGAGCTCGAGGGCGCG |
| | | | AGTTACCAGGTGCCCCCGCAGCCGAACGGCATGACCAACAACCTCCAGGG |
| | | | CAGCAACACCTATGCCCTGGAGAACACTATGATCTTCAACAGCCAGCCGG |
| | | | CGAACCCGGGCACCACCGCCACGTACCTCGAGGGCAACATGCTCATCACC |
| | | | AGCGAGAGCGAGACACAGCCGGTGAACCGCGTGGCGTACAACGTCGGCGG |
| | | | GCAGATGGCCACCAACAACCAGAGCTCCACCACTGCCCCCGCGACCGGCA |
| | | | CGTACAACCTCCAGGAAATCGTGCCCGGCAGCGTGTGGATGGAGAGGGAC |
| | | | GTGTACCTCCAAGGACCCATCTGGGCCAAGATCCCAGAGACAGGGGCGCA |
| | | | CTTTCACCCCTCTCCGGCCATGGGCGGATTCGGACTCAAACACCCACCGC |
| | | | CCATGATGCTCATCAAGAACACGCCTGTGCCCGGAAATATCACCAGCTTC |
| | | | TCGGACGTGCCCGTCAGCAGCTTCATCACCCAGTACAGCACCGGGCAGGT |
| | | | CACCGTGGAGATGGAGTGGGAGCTCAAGAAGGAAAACTCCAAGAGGTGGA |
| | | | ACCCAGAGATCCAGTACACAAACAACTACAACGACCCCCAGTTTGTGGAC |
| | | | TTTGCCCCGGACAGCACCGGGGAATACAGAACCACCAGACCTATCGGAAC |
| | | | CCGATACCTTACCCGACCCCTTTAA |
| 239 | 60 | MAAP_aa | MSSLKRETTPTSSTTTRTPSFRRSSPTTHPSGETSERQSFRPRKGFSNLL |
| | | | AWLKRVLRRPLPESG* |
| 240 | 60 | MAAP_nt | ATGAGCAGCTTAAAGCGGGAGACAACCCCTACCTCAAGTACAACCACGCG |
| | | | GACGCCGAGTTTCAGGAGAAGCTCGCCGACGACACATCCTTCGGGGGAAA |
| | | | CCTCGGAAAGGCAGTCTTTCAGGCCAAGAAAAGGGTTCTCGAACCTTTTG |
| | | | GCCTGGTTGAAGAGGGTGCTAAGACGGCCCCTACCGGAAAGCGGATAG |
| 241 | 61 | VP1_aa | MSFVDHPPDWLEEVGEGLREFLGLEAGPPKPKPNQQHEDQARGLVLPGYN |
| | | | YLGPGNGLDRGEPVNRADEVAREHDISYNEQLEAGDNPYLKYNHADAEFQ |
| | | | EKLADDTSFGGNLGKAVFQAKKRVLEPFGLVEEGAKTAPTGKRIDDHFPK |
| | | | RKKARTEEDSKPSTSSDAEAGPSGSQQLQIPAQPASSLGADTMSAGGGGP |
| | | | LGDNNQGADGVGNASGDWHCDSTWMGDRVVTKSTRTWVLPSYNNHQYREI |
| | | | KSGSVDGSNANAYFGYSTPWGYFDFNRFHSHWSPRDWQRLINNYWGFRPR |
| | | | SLRVKIFNIQVKEVTVQDSTTTIANNLTSTVQVFTDDDYQLPYVVGNGTE |
| | | | GCLPAFPPQVFTLPQYGYATLNRDNTENPTERSSFFCLEYFPSKMLRTGN |
| | | | NFEFTYNFEEVPFHSSFAPSQNLFKLANPLVDQYLYRFVSTNNTGGVQFN |
| | | | KNLAGRYANTYKNWFPGPMGRTQGWNLGSGVNRASVSAFATTNRMELEGA |
| | | | SYQVPPQPNGMTNNLQGSNTYALENTMIFNSQPANPGTTATYLEGNMLIT |
| | | | SESETQPVNRVAYNVGGQMATNNQSSTTAPATGTYNLQEIVPGSVWMERD |
| | | | VYLQGPIWAKIPETGAHFHPSPAMGGFGLKHPPPMMLIKNTPVPGNITSF |
| | | | SDVPVSSFITQYSTGQVTVEMEWELKKENSKRWNPEIQYTNNYNDPQFVD |
| | | | FAPDSTGEYRTTRPIGTRYLTRPL* |
| 242 | 61 | VP1_nt | ATGTCTTTTGTTGATCACCCTCCAGATTGGTTGGAAGAAGTTGGTGAAGG |
| | | | TCTTCGCGAGTTTTTGGGCCTTGAAGCGGGCCCACCGAAACCAAAACCCA |
| | | | ATCAGCAGCATGAGGATCAAGCCCGTGGTCTTGTGCTGCCTGGTTATAAC |
| | | | TATCTCGGACCCGGAAACGGGCTCGATCGAGGAGAGCCTGTCAACAGGGC |
| | | | AGACGAGGTCGCGCGAGAGCACGACATCTCGTACAACGAGCAGCTTGAGG |
| | | | CGGGAGACAACCCCTACCTCAAGTACAACCACGCGGACGCCGAGTTTCAG |
| | | | GAGAAGCTCGCCGACGACACATCCTTCGGGGGAAACCTCGGAAAGGCAGT |
| | | | CTTTCAGGCCAAGAAAAGGGTTCTCGAACCTTTTGGCCTGGTTGAAGAGG |
| | | | GTGCTAAGACGGCCCCTACCGGAAAGCGGATAGACGACCACTTTCCAAAA |
| | | | AGAAAGAAGGCTCGGACCGAAGAGGACTCCAAGCCTTCCACCTCGTCAGA |
| | | | CGCCGAAGCTGGACCCAGCGGATCCCAGCAGCTGCAAATCCCAGCCCAAC |
| | | | CAGCCTCAAGTTTGGGAGCTGATACAATGTCTGCGGGAGGTGGCGGCCCA |
| | | | TTGGGCGACAATAACCAAGGTGCCGATGGAGTGGGCAATGCCTCGGGAGA |
| | | | TTGGCATTGCGATTCCACGTGGATGGGGGACAGAGTCGTCACCAAGTCCA |
| | | | CCCGAACCTGGGTGCTGCCCAGCTACAACAACCACCAGTACCGAGAGATC |
| | | | AAAAGCGGCTCCGTCGACGGAAGCAACGCCAACGCCTACTTTGGATACAG |
| | | | CACCCCCTGGGGGTACTTTGACTTTAACCGCTTCCACAGCCACTGGAGCC |
| | | | CCCGAGACTGGCAAAGACTCATCAACAACTACTGGGGCTTCAGACCCCGG |
| | | | TCCCTCAGAGTCAAAATCTTCAACATTCAAGTCAAAGAGGTCACGGTGCA |
| | | | GGACTCCACCACCACCATCGCCAACAACCTCACCTCCACCGTCCAAGTGT |
| | | | TTACGGACGACGACTACCAGCTGCCCTACGTCGTCGGCAACGGGACCGAG |
| | | | GGATGCCTGCCGGCCTTCCCTCCGCAGGTCTTTACGCTGCCGCAGTACGG |
| | | | TTACGCGACGCTGAACCGCGACAACACAGAAAATCCCACCGAGAGGAGCA |
| | | | GCTTCTTCTGCCTAGAGTACTTTCCCAGCAAGATGCTGAGAACGGGCAAC |
| | | | AACTTTGAGTTTACCTACAACTTTGAGGAGGTGCCCTTCCACTCCAGCTT |
| | | | CGCTCCCAGTCAGAACCTGTTCAAGCTGGCCAACCCGCTGGTGGACCAGT |
| | | | ACTTGTACCGCTTCGTGAGCACAAATAACACTGGCGGAGTCCAGTTCAAC |
| | | | AAGAACCTGGCCGGGAGATACGCCAACACCTACAAAAACTGGTTCCCGGG |
| | | | GCCCATGGGCCGAACCCAGGGCTGGAACCTGGGCTCCGGGGTCAACCGCG |
| | | | CCAGTGTCAGCGCCTTCGCCACGACCAATAGGATGGAGCTCGAGGGCGCG |
| | | | AGTTACCAGGTGCCCCCGCAGCCGAACGGCATGACCAACAACCTCCAGGG |
| | | | CAGCAACACCTATGCCCTGGAGAACACTATGATCTTCAACAGCCAGCCGG |
| | | | CGAACCCGGGCACCACCGCCACGTACCTCGAGGGCAACATGCTCATCACC |
| | | | AGCGAGAGCGAGACACAGCCGGTGAACCGCGTGGCGTACAACGTCGGCGG |
| | | | GCAGATGGCCACCAACAACCAGAGCTCCACCACTGCCCCCGCGACCGGCA |
| | | | CGTACAACCTCCAGGAAATCGTGCCCGGCAGCGTGTGGATGGAGAGGGAC |
| | | | GTGTACCTCCAAGGACCCATCTGGGCCAAGATCCCAGAGACAGGGGCGCA |
| | | | CTTTCACCCCTCTCCGGCCATGGGCGGATTCGGACTCAAACACCCACCGC |
| | | | CCATGATGCTCATCAAGAACACGCCTGTGCCCGGAAATATCACCAGCTTC |
| | | | TCGGACGTGCCCGTCAGCAGCTTCATCACCCAGTACAGCACCGGGCAGGT |
| | | | CACCGTGGAGATGGAGTGGGAGCTCAAGAAGGAAAACTCCAAGAGGTGGA |
| | | | ACCCAGAGATCCAGTACACAAACAACTACAACGACCCCCAGTTTGTGGAC |
| | | | TTTGCCCCGGACAGCACCGGGGAATACAGAACCACCAGACCTATCGGAAC |
| | | | CCGATACCTTACCCGACCCCTTTAA |
| 243 | 61 | MAAP_aa | MRIKPVVLCCLVITISDPETGSIEESLSTGQTRSRESTTSRTTSSLRRET |
| | | | TPTSSTTTRTPSFRRSSPTTHPSGETSERQSFRPRKGFSNLLAWLKRVLR |
| | | | RPLPESG* |
| 244 | 61 | MAAP_nt | ATGAGGATCAAGCCCGTGGTCTTGTGCTGCCTGGTTATAACTATCTCGGA |
| | | | CCCGGAAACGGGCTCGATCGAGGAGAGCCTGTCAACAGGGCAGACGAGGT |
| | | | CGCGCGAGAGCACGACATCTCGTACAACGAGCAGCTTGAGGCGGGAGACA |
| | | | ACCCCTACCTCAAGTACAACCACGCGGACGCCGAGTTTCAGGAGAAGCTC |
| | | | GCCGACGACACATCCTTCGGGGGAAACCTCGGAAAGGCAGTCTTTCAGGC |
| | | | CAAGAAAAGGGTTCTCGAACCTTTTGGCCTGGTTGAAGAGGGTGCTAAGA |
| | | | CGGCCCCTACCGGAAAGCGGATAG |
| 245 | 62 | VP1_aa | MSFVDHPPDWLEEVGEGLREFLGLEPGPPKPKPNQQHQDQARGLVLPGYN |
| | | | YLGPGNGLDRGEPVNRADEVAREHDISYNEQLEAGDNPYLKYNHADAEFQ |
| | | | EKLADDTSFGGNLGKAVFQAKKRVLEPFGLVEEGAKTAPTGKRIDDHFPK |
| | | | RKKARTEEDSKPSTSSDAEAGPSGSQQLQIPAQPASSLGADTMSAGGGGP |
| | | | LGDNNQGADGVGNASGDWHCDSTWMGDRVVTKSTRTWVLPSYNNHQYREI |
| | | | KSGSVDGSNANAYFGYSTPWGYFDFNRFHSHWSPRDWQRLINNYWGFRPR |
| | | | SLRVKIFNIQVKEVTVQDSTTTIANNLTSTVQVFTDDDYQLPYVVGNGTE |
| | | | GCLPAFPPQVFTLPQYGYATLNRDNTENPTERSSFFCLEYFPSKMLRTGN |
| | | | NFEFTYNFEEVPFHSSFAPSQNLFKLANPLVDQYLYRFVSTNNTGGVQFN |
| | | | KNLAGRYANTYKNWFPGPMGRTQGWNLGSGVNRASVSAFATTNRMELEGA |
| | | | SYQVPPQPNGMTNNLQGSNTYALENTMIFNSQPANPGTTATYLEGNMLIT |
| | | | SESETQPVNRVAYNVGGQMATNNQSSTTAPATGTYNLQEIVPGSVWMERD |
| | | | VYLQGPIWAKIPETGAHFHPSPAMGGFGLKHPPPMMLIKNTPVPGNITSF |
| | | | SDVPVSSFITQYSTGQVTVEMEWELKKENSKRWNPEIQYTNNYNDPQFVD |
| | | | FAPDSTGEYRTTRPIGTRYLTRPL* |
| 246 | 62 | VP1_nt | ATGTCTTTTGTTGATCACCCTCCAGATTGGTTGGAAGAAGTTGGTGAAGG |
| | | | GCTTCGCGAGTTTTTGGGCCTTGAACCTGGCCCACCGAAACCAAAACCCA |
| | | | ATCAGCAGCATCAAGATCAAGCCCGTGGTCTTGTGCTGCCTGGTTATAAC |
| | | | TATCTCGGACCCGGAAACGGGCTCGATCGAGGAGAGCCTGTCAACAGGGC |
| | | | AGACGAGGTCGCGCGAGAGCACGACATCTCGTACAACGAGCAGCTTGAGG |
| | | | CGGGAGACAACCCCTACCTCAAGTACAACCACGCGGACGCCGAGTTTCAG |
| | | | GAGAAGCTCGCCGACGACACATCCTTCGGGGGAAACCTCGGAAAGGCAGT |
| | | | CTTTCAGGCCAAGAAAAGGGTTCTCGAACCTTTTGGCCTGGTTGAAGAGG |
| | | | GTGCTAAGACGGCCCCTACCGGAAAGCGGATAGACGACCACTTTCCAAAA |
| | | | AGAAAGAAGGCTCGGACCGAAGAGGACTCCAAGCCTTCCACCTCGTCAGA |
| | | | CGCCGAAGCTGGACCCAGCGGATCCCAGCAGCTGCAAATCCCAGCCCAAC |
| | | | CAGCCTCAAGTTTGGGAGCTGATACAATGTCTGCGGGAGGTGGCGGCCCA |
| | | | TTGGGCGACAATAACCAAGGTGCCGATGGAGTGGGCAATGCCTCGGGAGA |
| | | | TTGGCATTGCGATTCCACGTGGATGGGGGACAGAGTCGTCACCAAGTCCA |
| | | | CCCGAACCTGGGTGCTGCCCAGCTACAACAACCACCAGTACCGAGAGATC |
| | | | AAAAGCGGCTCCGTCGACGGAAGCAACGCCAACGCCTACTTTGGATACAG |
| | | | CACCCCCTGGGGGTACTTTGACTTTAACCGCTTCCACAGCCACTGGAGCC |
| | | | CCCGAGACTGGCAAAGACTCATCAACAACTACTGGGGCTTCAGACCCCGG |
| | | | TCCCTCAGAGTCAAAATCTTCAACATTCAAGTCAAAGAGGTCACGGTGCA |
| | | | GGACTCCACCACCACCATCGCCAACAACCTCACCTCCACCGTCCAAGTGT |
| | | | TTACGGACGACGACTACCAGCTGCCCTACGTCGTCGGCAACGGGACCGAG |
| | | | GGATGCCTGCCGGCCTTCCCTCCGCAGGTCTTTACGCTGCCGCAGTACGG |
| | | | TTACGCGACGCTGAACCGCGACAACACAGAAAATCCCACCGAGAGGAGCA |
| | | | GCTTCTTCTGCCTAGAGTACTTTCCCAGCAAGATGCTGAGAACGGGCAAC |
| | | | AACTTTGAGTTTACCTACAACTTTGAGGAGGTGCCCTTCCACTCCAGCTT |
| | | | CGCTCCCAGTCAGAACCTGTTCAAGCTGGCCAACCCGCTGGTGGACCAGT |
| | | | ACTTGTACCGCTTCGTGAGCACAAATAACACTGGCGGAGTCCAGTTCAAC |
| | | | AAGAACCTGGCCGGGAGATACGCCAACACCTACAAAAACTGGTTCCCGGG |
| | | | GCCCATGGGCCGAACCCAGGGCTGGAACCTGGGCTCCGGGGTCAACCGCG |
| | | | CCAGTGTCAGCGCCTTCGCCACGACCAATAGGATGGAGCTCGAGGGCGCG |
| | | | AGTTACCAGGTGCCCCCGCAGCCGAACGGCATGACCAACAACCTCCAGGG |
| | | | CAGCAACACCTATGCCCTGGAGAACACTATGATCTTCAACAGCCAGCCGG |
| | | | CGAACCCGGGCACCACCGCCACGTACCTCGAGGGCAACATGCTCATCACC |
| | | | AGCGAGAGCGAGACACAGCCGGTGAACCGCGTGGCGTACAACGTCGGCGG |
| | | | GCAGATGGCCACCAACAACCAGAGCTCCACCACTGCCCCCGCGACCGGCA |
| | | | CGTACAACCTCCAGGAAATCGTGCCCGGCAGCGTGTGGATGGAGAGGGAC |
| | | | GTGTACCTCCAAGGACCCATCTGGGCCAAGATCCCAGAGACAGGGGCGCA |
| | | | CTTTCACCCCTCTCCGGCCATGGGCGGATTCGGACTCAAACACCCACCGC |
| | | | CCATGATGCTCATCAAGAACACGCCTGTGCCCGGAAATATCACCAGCTTC |
| | | | TCGGACGTGCCCGTCAGCAGCTTCATCACCCAGTACAGCACCGGGCAGGT |
| | | | CACCGTGGAGATGGAGTGGGAGCTCAAGAAGGAAAACTCCAAGAGGTGGA |
| | | | ACCCAGAGATCCAGTACACAAACAACTACAACGACCCCCAGTTTGTGGAC |
| | | | TTTGCCCCGGACAGCACCGGGGAATACAGAACCACCAGACCTATCGGAAC |
| | | | CCGATACCTTACCCGACCCCTTTAA |
| 247 | 62 | MAAP_aa | LAHRNQNPISSIKIKPVVLCCLVITISDPETGSIEESLSTGQTRSRESTT |
| | | | SRTTSSLRRETTPTSSTTTRTPSFRRSSPTTHPSGETSERQSFRPRKGFS |
| | | | NLLAWLKRVLRRPLPESG* |
| 248 | 62 | MAAP_nt | CTGGCCCACCGAAACCAAAACCCAATCAGCAGCATCAAGATCAAGCCCGT |
| | | | GGTCTTGTGCTGCCTGGTTATAACTATCTCGGACCCGGAAACGGGCTCGA |
| | | | TCGAGGAGAGCCTGTCAACAGGGCAGACGAGGTCGCGCGAGAGCACGACA |
| | | | TCTCGTACAACGAGCAGCTTGAGGCGGGAGACAACCCCTACCTCAAGTAC |
| | | | AACCACGCGGACGCCGAGTTTCAGGAGAAGCTCGCCGACGACACATCCTT |
| | | | CGGGGGAAACCTCGGAAAGGCAGTCTTTCAGGCCAAGAAAAGGGTTCTCG |
| | | | AACCTTTTGGCCTGGTTGAAGAGGGTGCTAAGACGGCCCCTACCGGAAAG |
| | | | CGGATAG |
| 249 | 63 | VP1_aa | MSFVDHPPDWLEEVGEGLREFLGLEAGPPKPKPNQQHQDQARGLVLPGYN |
| | | | YLGPGNGLDRGEPVNRADEVAREHDISYDEQLEAGDNPYLKYNHADAEFQ |
| | | | EKLADDTSFGGNLGKAVFQAKKRVLEPFGLVEEGAKTAPTGKRIDDHFPK |
| | | | RKKARTEEDSKPSTSSDAEAGPSGSQQLQIPAQPASSLGADTMSAGGGGP |
| | | | LGDNNQGADGVGNASGDWHCDSTWMGDRVVTKSTRTWVLPSYNNHQYREI |
| | | | KSGSVDGSNANAYFGYSTPWGYFDFNRFHSHWSPRDWQRLINNYWGFRPR |
| | | | SLRVKIFNIQVKEVTVQDSTTTIANNLTSTVQVFTDDDYQLPYVVGNGTE |
| | | | GCLPAFPPQVFTLPQYGYATLNRDNTENPTERSSFFCLEYFPSKMLRTGN |
| | | | NFEFTYNFEEVPFHSSFAPSQNLFKLANPLVDQYLYRFVSTNNTGGVQFN |
| | | | KNLAGRYANTYKNWFPGPMGRTQGWNLGSGVNRASVSAFATTNRMELEGA |
| | | | SYQVPPQPNGMTNNLQGSNTYALENTMIFNSQPANPGTTATYLEGNMLIT |
| | | | SESETQPVNRVAYNVGGQMATNNQSSTTAPATGTYNLQEIVPGSVWMERD |
| | | | VYLQGPIWAKIPETGAHFHPSPAMGGFGLKHPPPMMLIKNTPVPGNITSF |
| | | | SDVPVSSFITQYSTGQVTVEMEWELKKENSKRWNPEIQYTNNYNDPQFVD |
| | | | FAPDSTGEYRTTRPIGTRYLTRPL* |
| 250 | 63 | VP1_nt | ATGTCTTTTGTTGATCACCCTCCAGATTGGTTGGAAGAAGTTGGTGAAGG |
| | | | TCTTCGCGAGTTTTTGGGCCTTGAAGCGGGCCCACCGAAACCAAAACCCA |
| | | | ATCAGCAGCATCAAGATCAAGCCCGTGGTCTTGTGCTGCCTGGTTATAAC |
| | | | TATCTCGGACCCGGAAACGGGCTCGATCGAGGAGAGCCTGTCAACAGGGC |
| | | | AGACGAGGTCGCGCGAGAGCACGACATCTCGTACGATGAGCAGCTTGAGG |
| | | | CGGGAGACAACCCCTACCTCAAGTACAACCACGCGGACGCCGAGTTTCAG |
| | | | GAGAAGCTCGCCGACGACACATCCTTCGGGGGAAACCTCGGAAAGGCAGT |
| | | | CTTTCAGGCCAAGAAAAGGGTTCTCGAACCTTTTGGCCTGGTTGAAGAGG |
| | | | GTGCTAAGACGGCCCCTACCGGAAAGCGGATAGACGACCACTTTCCAAAA |
| | | | AGAAAGAAGGCTCGGACCGAAGAGGACTCCAAGCCTTCCACCTCGTCAGA |
| | | | CGCCGAAGCTGGACCCAGCGGATCCCAGCAGCTGCAAATCCCAGCCCAAC |
| | | | CAGCCTCAAGTTTGGGAGCTGATACAATGTCTGCGGGAGGTGGCGGCCCA |
| | | | TTGGGCGACAATAACCAAGGTGCCGATGGAGTGGGCAATGCCTCGGGAGA |
| | | | TTGGCATTGCGATTCCACGTGGATGGGGGACAGAGTCGTCACCAAGTCCA |
| | | | CCCGAACCTGGGTGCTGCCCAGCTACAACAACCACCAGTACCGAGAGATC |
| | | | AAAAGCGGCTCCGTCGACGGAAGCAACGCCAACGCCTACTTTGGATACAG |
| | | | CACCCCCTGGGGGTACTTTGACTTTAACCGCTTCCACAGCCACTGGAGCC |
| | | | CCCGAGACTGGCAAAGACTCATCAACAACTACTGGGGCTTCAGACCCCGG |
| | | | TCCCTCAGAGTCAAAATCTTCAACATTCAAGTCAAAGAGGTCACGGTGCA |
| | | | GGACTCCACCACCACCATCGCCAACAACCTCACCTCCACCGTCCAAGTGT |
| | | | TTACGGACGACGACTACCAGCTGCCCTACGTCGTCGGCAACGGGACCGAG |
| | | | GGATGCCTGCCGGCCTTCCCTCCGCAGGTCTTTACGCTGCCGCAGTACGG |
| | | | TTACGCGACGCTGAACCGCGACAACACAGAAAATCCCACCGAGAGGAGCA |
| | | | GCTTCTTCTGCCTAGAGTACTTTCCCAGCAAGATGCTGAGAACGGGCAAC |
| | | | AACTTTGAGTTTACCTACAACTTTGAGGAGGTGCCCTTCCACTCCAGCTT |
| | | | CGCTCCCAGTCAGAACCTGTTCAAGCTGGCCAACCCGCTGGTGGACCAGT |
| | | | ACTTGTACCGCTTCGTGAGCACAAATAACACTGGCGGAGTCCAGTTCAAC |
| | | | AAGAACCTGGCCGGGAGATACGCCAACACCTACAAAAACTGGTTCCCGGG |
| | | | GCCCATGGGCCGAACCCAGGGCTGGAACCTGGGCTCCGGGGTCAACCGCG |
| | | | CCAGTGTCAGCGCCTTCGCCACGACCAATAGGATGGAGCTCGAGGGCGCG |
| | | | AGTTACCAGGTGCCCCCGCAGCCGAACGGCATGACCAACAACCTCCAGGG |
| | | | CAGCAACACCTATGCCCTGGAGAACACTATGATCTTCAACAGCCAGCCGG |
| | | | CGAACCCGGGCACCACCGCCACGTACCTCGAGGGCAACATGCTCATCACC |
| | | | AGCGAGAGCGAGACACAGCCGGTGAACCGCGTGGCGTACAACGTCGGCGG |
| | | | GCAGATGGCCACCAACAACCAGAGCTCCACCACTGCCCCCGCGACCGGCA |
| | | | CGTACAACCTCCAGGAAATCGTGCCCGGCAGCGTGTGGATGGAGAGGGAC |
| | | | GTGTACCTCCAAGGACCCATCTGGGCCAAGATCCCAGAGACAGGGGCGCA |
| | | | CTTTCACCCCTCTCCGGCCATGGGCGGATTCGGACTCAAACACCCACCGC |
| | | | CCATGATGCTCATCAAGAACACGCCTGTGCCCGGAAATATCACCAGCTTC |
| | | | TCGGACGTGCCCGTCAGCAGCTTCATCACCCAGTACAGCACCGGGCAGGT |
| | | | CACCGTGGAGATGGAGTGGGAGCTCAAGAAGGAAAACTCCAAGAGGTGGA |
| | | | ACCCAGAGATCCAGTACACAAACAACTACAACGACCCCCAGTTTGTGGAC |
| | | | TTTGCCCCGGACAGCACCGGGGAATACAGAACCACCAGACCTATCGGAAC |
| | | | CCGATACCTTACCCGACCCCTTTAA |
| 251 | 63 | MAAP_aa | MSSLRRETTPTSSTTTRTPSFRRSSPTTHPSGETSERQSFRPRKGFSNLL |
| | | | AWLKRVLRRPLPESG* |
| 252 | 63 | MAAP_nt | ATGAGCAGCTTGAGGCGGGAGACAACCCCTACCTCAAGTACAACCACGCG |
| | | | GACGCCGAGTTTCAGGAGAAGCTCGCCGACGACACATCCTTCGGGGGAAA |
| | | | CCTCGGAAAGGCAGTCTTTCAGGCCAAGAAAAGGGTTCTCGAACCTTTTG |
| | | | GCCTGGTTGAAGAGGGTGCTAAGACGGCCCCTACCGGAAAGCGGATAG |
| 253 | 64 | VP1_aa | MSFVDHPPDWLEEVGEGLREFLGLEAGPPKPKPNQQHQHADQARGLVLPG |
| | | | YNYLGPFNGLDRGEPVNRADEVAREHDISYNEQLEAGDNPYLKYNHADAE |
| | | | FQEKLADDTSFGGNLGKAVFQAKKRVLEPFGLVEEGAKTAPTGKRIDDHF |
| | | | PKRKKARTEEDSKPSTSSDAEAGPSGSQQLQIPAQPASSLGADTMSAGGG |
| | | | GPLGDNNQGADGVGNASGDWHCDSTWMGDRVVTKSTRTWVLPSYNNHQYR |
| | | | EIKSGSVDGSNANAYFGYSTPWGYFDFNRFHSHWSPRDWQRLINNYWGFR |
| | | | PRSLRVKIFNIQVKEVTVQDSTTTIANNLTSTVQVFTDDDYQLPYVVGNG |
| | | | TEGCLPAFPPQVFTLPQYGYATLNRDNTENPTERSSFFCLEYFPSKMLRT |
| | | | GNNFEFTYNFEEVPFHSSFAPSQNLFKLANPLVDQYLYRFVSTNNTGGVQ |
| | | | FNKNLAGRYANTYKNWFPGPMGRTQGWNLGSGVNRASVSAFATTNRMELE |
| | | | GASYQVPPQPNGMTNNLQGSNTYALENTMIFNSQPANPGTTATYLEGNML |
| | | | ITSESETQPVNRVAYNVGGQMATNNQSSTTAPATGTYNLQEIVPGSVWME |
| | | | RDVYLQGPIWAKIPETGAHFHPSPAMGGFGLKHPPPMMLIKNTPVPGNIT |
| | | | SFSDVPVSSFITQYSTGQVTVEMEWELKKENSKRWNPEIQYTNNYNDPQF |
| | | | VDFAPDSTGEYRTTRPIGTRYLTRPL* |
| 254 | 64 | VP1_nt | ATGTCTTTTGTTGATCACCCTCCAGATTGGTTGGAAGAAGTTGGTGAAGG |
| | | | TCTTCGCGAGTTTTTGGGCCTTGAAGCGGGCCCACCGAAACCAAAACCCA |
| | | | ATCAGCAGCATCAACATGCCGATCAAGCCCGTGGTCTTGTGCTGCCTGGT |
| | | | TATAACTATCTCGGACCCTTCAACGGGCTCGATCGAGGAGAGCCTGTCAA |
| | | | CAGGGCAGACGAGGTCGCGCGAGAGCACGACATCTCGTACAACGAGCAGC |
| | | | TTGAGGCGGGAGACAACCCCTACCTCAAGTACAACCACGCGGACGCCGAG |
| | | | TTTCAGGAGAAGCTCGCCGACGACACATCCTTCGGGGGAAACCTCGGAAA |
| | | | GGCAGTCTTTCAGGCCAAGAAAAGGGTTCTCGAACCTTTTGGCCTGGTTG |
| | | | AAGAGGGTGCTAAGACGGCCCCTACCGGAAAGCGGATAGACGACCACTTT |
| | | | CCAAAAAGAAAGAAGGCTCGGACCGAAGAGGACTCCAAGCCTTCCACCTC |
| | | | GTCAGACGCCGAAGCTGGACCCAGCGGATCCCAGCAGCTGCAAATCCCAG |
| | | | CCCAACCAGCCTCAAGTTTGGGAGCTGATACAATGTCTGCGGGAGGTGGC |
| | | | GGCCCATTGGGCGACAATAACCAAGGTGCCGATGGAGTGGGCAATGCCTC |
| | | | GGGAGATTGGCATTGCGATTCCACGTGGATGGGGGACAGAGTCGTCACCA |
| | | | AGTCCACCCGAACCTGGGTGCTGCCCAGCTACAACAACCACCAGTACCGA |
| | | | GAGATCAAAAGCGGCTCCGTCGACGGAAGCAACGCCAACGCCTACTTTGG |
| | | | ATACAGCACCCCCTGGGGGTACTTTGACTTTAACCGCTTCCACAGCCACT |
| | | | GGAGCCCCCGAGACTGGCAAAGACTCATCAACAACTACTGGGGCTTCAGA |
| | | | CCCCGGTCCCTCAGAGTCAAAATCTTCAACATTCAAGTCAAAGAGGTCAC |
| | | | GGTGCAGGACTCCACCACCACCATCGCCAACAACCTCACCTCCACCGTCC |
| | | | AAGTGTTTACGGACGACGACTACCAGCTGCCCTACGTCGTCGGCAACGGG |
| | | | ACCGAGGGATGCCTGCCGGCCTTCCCTCCGCAGGTCTTTACGCTGCCGCA |
| | | | GTACGGTTACGCGACGCTGAACCGCGACAACACAGAAAATCCCACCGAGA |
| | | | GGAGCAGCTTCTTCTGCCTAGAGTACTTTCCCAGCAAGATGCTGAGAACG |
| | | | GGCAACAACTTTGAGTTTACCTACAACTTTGAGGAGGTGCCCTTCCACTC |
| | | | CAGCTTCGCTCCCAGTCAGAACCTGTTCAAGCTGGCCAACCCGCTGGTGG |
| | | | ACCAGTACTTGTACCGCTTCGTGAGCACAAATAACACTGGCGGAGTCCAG |
| | | | TTCAACAAGAACCTGGCCGGGAGATACGCCAACACCTACAAAAACTGGTT |
| | | | CCCGGGGCCCATGGGCCGAACCCAGGGCTGGAACCTGGGCTCCGGGGTCA |
| | | | ACCGCGCCAGTGTCAGCGCCTTCGCCACGACCAATAGGATGGAGCTCGAG |
| | | | GGCGCGAGTTACCAGGTGCCCCCGCAGCCGAACGGCATGACCAACAACCT |
| | | | CCAGGGCAGCAACACCTATGCCCTGGAGAACACTATGATCTTCAACAGCC |
| | | | AGCCGGCGAACCCGGGCACCACCGCCACGTACCTCGAGGGCAACATGCTC |
| | | | ATCACCAGCGAGAGCGAGACACAGCCGGTGAACCGCGTGGCGTACAACGT |
| | | | CGGCGGGCAGATGGCCACCAACAACCAGAGCTCCACCACTGCCCCCGCGA |
| | | | CCGGCACGTACAACCTCCAGGAAATCGTGCCCGGCAGCGTGTGGATGGAG |
| | | | AGGGACGTGTACCTCCAAGGACCCATCTGGGCCAAGATCCCAGAGACAGG |
| | | | GGCGCACTTTCACCCCTCTCCGGCCATGGGCGGATTCGGACTCAAACACC |
| | | | CACCGCCCATGATGCTCATCAAGAACACGCCTGTGCCCGGAAATATCACC |
| | | | AGCTTCTCGGACGTGCCCGTCAGCAGCTTCATCACCCAGTACAGCACCGG |
| | | | GCAGGTCACCGTGGAGATGGAGTGGGAGCTCAAGAAGGAAAACTCCAAGA |
| | | | GGTGGAACCCAGAGATCCAGTACACAAACAACTACAACGACCCCCAGTTT |
| | | | GTGGACTTTGCCCCGGACAGCACCGGGGAATACAGAACCACCAGACCTAT |
| | | | CGGAACCCGATACCTTACCCGACCCCTTTAA |
| 255 | 64 | MAAP_aa | MPIKPVVLCCLVITISDPSTGSIEESLSTGQTRSRESTTSRTTSSLRRET |
| | | | TPTSSTTTRTPSFRRSSPTTHPSGETSERQSFRPRKGFSNLLAWLKRVLR |
| | | | RPLPESG* |
| 256 | 64 | MAAP_nt | ATGCCGATCAAGCCCGTGGTCTTGTGCTGCCTGGTTATAACTATCTCGGA |
| | | | CCCTTCAACGGGCTCGATCGAGGAGAGCCTGTCAACAGGGCAGACGAGGT |
| | | | CGCGCGAGAGCACGACATCTCGTACAACGAGCAGCTTGAGGCGGGAGACA |
| | | | ACCCCTACCTCAAGTACAACCACGCGGACGCCGAGTTTCAGGAGAAGCTC |
| | | | GCCGACGACACATCCTTCGGGGGAAACCTCGGAAAGGCAGTCTTTCAGGC |
| | | | CAAGAAAAGGGTTCTCGAACCTTTTGGCCTGGTTGAAGAGGGTGCTAAGA |
| | | | CGGCCCCTACCGGAAAGCGGATAG |
| 257 | 65 | VP1_aa | MSFVDHPPDWLDEEVGEGLREFLGLEAGPPKPKPNQQHQDQARGLVLPGY |
| | | | NYLGPGNGLDRGEPVNRADEVAREHDISYNEQLEAGDNPYLKYNHADAEF |
| | | | QEKLADDTSFGGNLGKAVFQAKKRVLEPFGLVEEGAKTAPTGKRIDDHFP |
| | | | KRKKARTEEDSKPSTSSDAEAGPSGSQQLQIPAQPASSLGADTMSAGGGG |
| | | | PLGDNNQGADGVGNASGDWHCDSTWMGDRVVTKSTRTWVLPSYNNHQYRE |
| | | | IKSGSVDGSNANAYFGYSTPWGYFDFNRFHSHWSPRDWQRLINNYWGFRP |
| | | | RSLRVKIFNIQVKEVTVQDSTTTIANNLTSTVQVFTDDDYQLPYVVGNGT |
| | | | EGCLPAFPPQVFTLPQYGYATLNRDNTENPTERSSFFCLEYFPSKMLRTG |
| | | | NNFEFTYNFEEVPFHSSFAPSQNLFKLANPLVDQYLYRFVSTNNTGGVQF |
| | | | NKNLAGRYANTYKNWFPGPMGRTQGWNLGSGVNRASVSAFATTNRMELEG |
| | | | ASYQVPPQPNGMTNNLQGSNTYALENTMIFNSQPANPGTTATYLEGNMLI |
| | | | TSESETQPVNRVAYNVGGQMATNNQSSTTAPATGTYNLQEIVPGSVWMER |
| | | | DVYLQGPIWAKIPETGAHFHPSPAMGGFGLKHPPPMMLIKNTPVPGNITS |
| | | | FSDVPVSSFITQYSTGQVTVEMEWELKKENSKRWNPEIQYTNNYNDPQFV |
| | | | DFAPDSTGEYRTTRPIGTRYLTRPL* |
| 258 | 65 | VP1_nt | ATGTCTTTTGTTGATCACCCTCCAGATTGGTTGGATGAAGAAGTTGGTGA |
| | | | AGGACTTCGCGAGTTTTTGGGCCTTGAAGCGGGCCCACCGAAACCAAAAC |
| | | | CCAATCAGCAGCATCAAGATCAAGCCCGTGGTCTTGTGCTGCCTGGTTAT |
| | | | AACTATCTCGGACCCGGAAACGGGCTCGATCGAGGAGAGCCTGTCAACAG |
| | | | GGCAGACGAGGTCGCGCGAGAGCACGACATCTCGTACAACGAGCAGCTTG |
| | | | AGGCGGGAGACAACCCCTACCTCAAGTACAACCACGCGGACGCCGAGTTT |
| | | | CAGGAGAAGCTCGCCGACGACACATCCTTCGGGGGAAACCTCGGAAAGGC |
| | | | AGTCTTTCAGGCCAAGAAAAGGGTTCTCGAACCTTTTGGCCTGGTTGAAG |
| | | | AGGGTGCTAAGACGGCCCCTACCGGAAAGCGGATAGACGACCACTTTCCA |
| | | | AAAAGAAAGAAGGCTCGGACCGAAGAGGACTCCAAGCCTTCCACCTCGTC |
| | | | AGACGCCGAAGCTGGACCCAGCGGATCCCAGCAGCTGCAAATCCCAGCCC |
| | | | AACCAGCCTCAAGTTTGGGAGCTGATACAATGTCTGCGGGAGGTGGCGGC |
| | | | CCATTGGGCGACAATAACCAAGGTGCCGATGGAGTGGGCAATGCCTCGGG |
| | | | AGATTGGCATTGCGATTCCACGTGGATGGGGGACAGAGTCGTCACCAAGT |
| | | | CCACCCGAACCTGGGTGCTGCCCAGCTACAACAACCACCAGTACCGAGAG |
| | | | ATCAAAAGCGGCTCCGTCGACGGAAGCAACGCCAACGCCTACTTTGGATA |
| | | | CAGCACCCCCTGGGGGTACTTTGACTTTAACCGCTTCCACAGCCACTGGA |
| | | | GCCCCCGAGACTGGCAAAGACTCATCAACAACTACTGGGGCTTCAGACCC |
| | | | CGGTCCCTCAGAGTCAAAATCTTCAACATTCAAGTCAAAGAGGTCACGGT |
| | | | GCAGGACTCCACCACCACCATCGCCAACAACCTCACCTCCACCGTCCAAG |
| | | | TGTTTACGGACGACGACTACCAGCTGCCCTACGTCGTCGGCAACGGGACC |
| | | | GAGGGATGCCTGCCGGCCTTCCCTCCGCAGGTCTTTACGCTGCCGCAGTA |
| | | | CGGTTACGCGACGCTGAACCGCGACAACACAGAAAATCCCACCGAGAGGA |
| | | | GCAGCTTCTTCTGCCTAGAGTACTTTCCCAGCAAGATGCTGAGAACGGGC |
| | | | AACAACTTTGAGTTTACCTACAACTTTGAGGAGGTGCCCTTCCACTCCAG |
| | | | CTTCGCTCCCAGTCAGAACCTGTTCAAGCTGGCCAACCCGCTGGTGGACC |
| | | | AGTACTTGTACCGCTTCGTGAGCACAAATAACACTGGCGGAGTCCAGTTC |
| | | | AACAAGAACCTGGCCGGGAGATACGCCAACACCTACAAAAACTGGTTCCC |
| | | | GGGGCCCATGGGCCGAACCCAGGGCTGGAACCTGGGCTCCGGGGTCAACC |
| | | | GCGCCAGTGTCAGCGCCTTCGCCACGACCAATAGGATGGAGCTCGAGGGC |
| | | | GCGAGTTACCAGGTGCCCCCGCAGCCGAACGGCATGACCAACAACCTCCA |
| | | | GGGCAGCAACACCTATGCCCTGGAGAACACTATGATCTTCAACAGCCAGC |
| | | | CGGCGAACCCGGGCACCACCGCCACGTACCTCGAGGGCAACATGCTCATC |
| | | | ACCAGCGAGAGCGAGACACAGCCGGTGAACCGCGTGGCGTACAACGTCGG |
| | | | CGGGCAGATGGCCACCAACAACCAGAGCTCCACCACTGCCCCCGCGACCG |
| | | | GCACGTACAACCTCCAGGAAATCGTGCCCGGCAGCGTGTGGATGGAGAGG |
| | | | GACGTGTACCTCCAAGGACCCATCTGGGCCAAGATCCCAGAGACAGGGGC |
| | | | GCACTTTCACCCCTCTCCGGCCATGGGCGGATTCGGACTCAAACACCCAC |
| | | | CGCCCATGATGCTCATCAAGAACACGCCTGTGCCCGGAAATATCACCAGC |
| | | | TTCTCGGACGTGCCCGTCAGCAGCTTCATCACCCAGTACAGCACCGGGCA |
| | | | GGTCACCGTGGAGATGGAGTGGGAGCTCAAGAAGGAAAACTCCAAGAGGT |
| | | | GGAACCCAGAGATCCAGTACACAAACAACTACAACGACCCCCAGTTTGTG |
| | | | GACTTTGCCCCGGACAGCACCGGGGAATACAGAACCACCAGACCTATCGG |
| | | | AACCCGATACCTTACCCGACCCCTTTAA |
| 259 | 65 | MAAP_aa | MKKLVKDFASFWALKRAHRNQNPISSIKIKPVVLCCLVITISDPETGSIE |
| | | | ESLSTGQTRSRESTTSRTTSSLRRETTPTSSTTTRTPSFRRSSPTTHPSG |
| | | | ETSERQSFRPRKGFSNLLAWLKRVLRRPLPESG* |
| 260 | 65 | MAAP_nt | ATGAAGAAGTTGGTGAAGGACTTCGCGAGTTTTTGGGCCTTGAAGCGGGC |
| | | | CCACCGAAACCAAAACCCAATCAGCAGCATCAAGATCAAGCCCGTGGTCT |
| | | | TGTGCTGCCTGGTTATAACTATCTCGGACCCGGAAACGGGCTCGATCGAG |
| | | | GAGAGCCTGTCAACAGGGCAGACGAGGTCGCGCGAGAGCACGACATCTCG |
| | | | TACAACGAGCAGCTTGAGGCGGGAGACAACCCCTACCTCAAGTACAACCA |
| | | | CGCGGACGCCGAGTTTCAGGAGAAGCTCGCCGACGACACATCCTTCGGGG |
| | | | GAAACCTCGGAAAGGCAGTCTTTCAGGCCAAGAAAAGGGTTCTCGAACCT |
| | | | TTTGGCCTGGTTGAAGAGGGTGCTAAGACGGCCCCTACCGGAAAGCGGAT |
| | | | AG |
| 261 | 66 | VP1_aa | MSFVDHPPDWLEEVGEGLREFLGLEAGPPKPKPAEQHKDDARGLVLPGYN |
| | | | YLGPGNGLDRGEPVNRADEVAREHDISYNEQLEAGDNPYLKYNHADAEFQ |
| | | | EKLADDTSFGGNLGKAVFQAKKRVLEPFGLVEEGAKTAPTGKRIDDHFPK |
| | | | RKKARTEEDSKPSTSSDAEAGPSGSQQLQIPAQPASSLGADTMSAGGGGP |
| | | | LGDNNQGADGVGNASGDWHCDSTWMGDRVVTKSTRTWVLPSYNNHQYREI |
| | | | KSGSVDGSNANAYFGYSTPWGYFDFNRFHSHWSPRDWQRLINNYWGFRPR |
| | | | SLRVKIFNIQVKEVTVQDSTTTIANNLTSTVQVFTDDDYQLPYVVGNGTE |
| | | | GCLPAFPPQVFTLPQYGYATLNRDNTENPTERSSFFCLEYFPSKMLRTGN |
| | | | NFEFTYNFEEVPFHSSFAPSQNLFKLANPLVDQYLYRFVSTNNTGGVQFN |
| | | | KNLAGRYANTYKNWFPGPMGRTQGWNLGSGVNRASVSAFATTNRMELEGA |
| | | | SYQVPPQPNGMTNNLQGSNTYALENTMIFNSQPANPGTTATYLEGNMLIT |
| | | | SESETQPVNRVAYNVGGQMATNNQSSTTAPATGTYNLQEIVPGSVWMERD |
| | | | VYLQGPIWAKIPETGAHFHPSPAMGGFGLKHPPPMMLIKNTPVPGNITSF |
| | | | SDVPVSSFITQYSTGQVTVEMEWELKKENSKRWNPEIQYTNNYNDPQFVD |
| | | | FAPDSTGEYRTTRPIGTRYLTRPL* |
| 262 | 66 | VP1_nt | ATGTCTTTTGTTGATCACCCTCCAGATTGGTTGGAAGAAGTTGGTGAAGG |
| | | | TCTTCGCGAGTTTTTGGGCCTTGAAGCGGGCCCACCGAAACCAAAACCCG |
| | | | CCGAGCAGCATAAGGATGACGCCCGTGGTCTTGTGCTGCCTGGTTATAAC |
| | | | TATCTCGGACCCGGAAACGGGCTCGATCGAGGAGAGCCTGTCAACAGGGC |
| | | | AGACGAGGTCGCGCGAGAGCACGACATCTCGTACAACGAGCAGCTTGAGG |
| | | | CGGGAGACAACCCCTACCTCAAGTACAACCACGCGGACGCCGAGTTTCAG |
| | | | GAGAAGCTCGCCGACGACACATCCTTCGGGGGAAACCTCGGAAAGGCAGT |
| | | | CTTTCAGGCCAAGAAAAGGGTTCTCGAACCTTTTGGCCTGGTTGAAGAGG |
| | | | GTGCTAAGACGGCCCCTACCGGAAAGCGGATAGACGACCACTTTCCAAAA |
| | | | AGAAAGAAGGCTCGGACCGAAGAGGACTCCAAGCCTTCCACCTCGTCAGA |
| | | | CGCCGAAGCTGGACCCAGCGGATCCCAGCAGCTGCAAATCCCAGCCCAAC |
| | | | CAGCCTCAAGTTTGGGAGCTGATACAATGTCTGCGGGAGGTGGCGGCCCA |
| | | | TTGGGCGACAATAACCAAGGTGCCGATGGAGTGGGCAATGCCTCGGGAGA |
| | | | TTGGCATTGCGATTCCACGTGGATGGGGGACAGAGTCGTCACCAAGTCCA |
| | | | CCCGAACCTGGGTGCTGCCCAGCTACAACAACCACCAGTACCGAGAGATC |
| | | | AAAAGCGGCTCCGTCGACGGAAGCAACGCCAACGCCTACTTTGGATACAG |
| | | | CACCCCCTGGGGGTACTTTGACTTTAACCGCTTCCACAGCCACTGGAGCC |
| | | | CCCGAGACTGGCAAAGACTCATCAACAACTACTGGGGCTTCAGACCCCGG |
| | | | TCCCTCAGAGTCAAAATCTTCAACATTCAAGTCAAAGAGGTCACGGTGCA |
| | | | GGACTCCACCACCACCATCGCCAACAACCTCACCTCCACCGTCCAAGTGT |
| | | | TTACGGACGACGACTACCAGCTGCCCTACGTCGTCGGCAACGGGACCGAG |
| | | | GGATGCCTGCCGGCCTTCCCTCCGCAGGTCTTTACGCTGCCGCAGTACGG |
| | | | TTACGCGACGCTGAACCGCGACAACACAGAAAATCCCACCGAGAGGAGCA |
| | | | GCTTCTTCTGCCTAGAGTACTTTCCCAGCAAGATGCTGAGAACGGGCAAC |
| | | | AACTTTGAGTTTACCTACAACTTTGAGGAGGTGCCCTTCCACTCCAGCTT |
| | | | CGCTCCCAGTCAGAACCTGTTCAAGCTGGCCAACCCGCTGGTGGACCAGT |
| | | | ACTTGTACCGCTTCGTGAGCACAAATAACACTGGCGGAGTCCAGTTCAAC |
| | | | AAGAACCTGGCCGGGAGATACGCCAACACCTACAAAAACTGGTTCCCGGG |
| | | | GCCCATGGGCCGAACCCAGGGCTGGAACCTGGGCTCCGGGGTCAACCGCG |
| | | | CCAGTGTCAGCGCCTTCGCCACGACCAATAGGATGGAGCTCGAGGGCGCG |
| | | | AGTTACCAGGTGCCCCCGCAGCCGAACGGCATGACCAACAACCTCCAGGG |
| | | | CAGCAACACCTATGCCCTGGAGAACACTATGATCTTCAACAGCCAGCCGG |
| | | | CGAACCCGGGCACCACCGCCACGTACCTCGAGGGCAACATGCTCATCACC |
| | | | AGCGAGAGCGAGACACAGCCGGTGAACCGCGTGGCGTACAACGTCGGCGG |
| | | | GCAGATGGCCACCAACAACCAGAGCTCCACCACTGCCCCCGCGACCGGCA |
| | | | CGTACAACCTCCAGGAAATCGTGCCCGGCAGCGTGTGGATGGAGAGGGAC |
| | | | GTGTACCTCCAAGGACCCATCTGGGCCAAGATCCCAGAGACAGGGGCGCA |
| | | | CTTTCACCCCTCTCCGGCCATGGGCGGATTCGGACTCAAACACCCACCGC |
| | | | CCATGATGCTCATCAAGAACACGCCTGTGCCCGGAAATATCACCAGCTTC |
| | | | TCGGACGTGCCCGTCAGCAGCTTCATCACCCAGTACAGCACCGGGCAGGT |
| | | | CACCGTGGAGATGGAGTGGGAGCTCAAGAAGGAAAACTCCAAGAGGTGGA |
| | | | ACCCAGAGATCCAGTACACAAACAACTACAACGACCCCCAGTTTGTGGAC |
| | | | TTTGCCCCGGACAGCACCGGGGAATACAGAACCACCAGACCTATCGGAAC |
| | | | CCGATACCTTACCCGACCCCTTTAA |
| 263 | 66 | MAAP_aa | MTPVVLCCLVITISDPETGSIEESLSTGQTRSRESTTSRTTSSLRRETTP |
| | | | TSSTTTRTPSFRRSSPTTHPSGETSERQSFRPRKGFSNLLAWLKRVLRRP |
| | | | LPESG* |
| 264 | 66 | MAAP_nt | ATGACGCCCGTGGTCTTGTGCTGCCTGGTTATAACTATCTCGGACCCGGA |
| | | | AACGGGCTCGATCGAGGAGAGCCTGTCAACAGGGCAGACGAGGTCGCGCG |
| | | | AGAGCACGACATCTCGTACAACGAGCAGCTTGAGGCGGGAGACAACCCCT |
| | | | ACCTCAAGTACAACCACGCGGACGCCGAGTTTCAGGAGAAGCTCGCCGAC |
| | | | GACACATCCTTCGGGGGAAACCTCGGAAAGGCAGTCTTTCAGGCCAAGAA |
| | | | AAGGGTTCTCGAACCTTTTGGCCTGGTTGAAGAGGGTGCTAAGACGGCCC |
| | | | CTACCGGAAAGCGGATAG |
| 265 | 67 | VP1_aa | MSFVDHPPDWLEEVGEGLREFLGLEAGPPKPKPAERHKDDSRGLVLPGYR |
| | | | YLGPFNGLDKGEPVNEADEVAREHDISYNEQLEAGDNPYLKYNHADAEFQ |
| | | | EKLADDTSFGGNLGKAVFQAKKRVLEPFGLVEEGAKTAPTGKRIDDHFPK |
| | | | RKKARTEEDSKPSTSSDAEAGPSGSQQLQIPAQPASSLGADTMSAGGGGP |
| | | | LGDNNQGADGVGNASGDWHCDSTWMGDRVVTKSTRTWVLPSYNNHQYREI |
| | | | KSGSVDGSNANAYFGYSTPWGYFDFNRFHSHWSPRDWQRLINNYWGFRPR |
| | | | SLRVKIFNIQVKEVTVQDSTTTIANNLTSTVQVFTDDDYQLPYVVGNGTE |
| | | | GCLPAFPPQVFTLPQYGYATLNRDNTENPTERSSFFCLEYFPSKMLRTGN |
| | | | NFEFTYNFEEVPFHSSFAPSQNLFKLANPLVDQYLYRFVSTNNTGGVQFN |
| | | | KNLAGRYANTYKNWFPGPMGRTQGWNLGSGVNRASVSAFATTNRMELEGA |
| | | | SYQVPPQPNGMTNNLQGSNTYALENTMIFNSQPANPGTTATYLEGNMLIT |
| | | | SESETQPVNRVAYNVGGQMATNNQSSTTAPATGTYNLQEIVPGSVWMERD |
| | | | VYLQGPIWAKIPETGAHFHPSPAMGGFGLKHPPPMMLIKNTPVPGNITSF |
| | | | SDVPVSSFITQYSTGQVTVEMEWELKKENSKRWNPEIQYTNNYNDPQFVD |
| | | | FAPDSTGEYRTTRPIGTRYLTRPL* |
| 266 | 67 | VP1_nt | ATGTCTTTTGTTGATCACCCTCCAGATTGGTTGGAAGAAGTTGGTGAAGG |
| | | | TCTTCGCGAGTTTTTGGGCCTTGAAGCGGGCCCACCGAAACCAAAACCCG |
| | | | CTGAACGCCATAAGGATGACTCTCGTGGTCTTGTGCTGCCTGGTTATCGT |
| | | | TATCTCGGACCCTTCAACGGGCTCGATAAAGGAGAGCCTGTCAACGAGGC |
| | | | AGACGAGGTCGCGCGAGAGCACGACATCTCGTACAACGAGCAGCTTGAGG |
| | | | CGGGAGACAACCCCTACCTCAAGTACAACCACGCGGACGCCGAGTTTCAG |
| | | | GAGAAGCTCGCCGACGACACATCCTTCGGGGGAAACCTCGGAAAGGCAGT |
| | | | CTTTCAGGCCAAGAAAAGGGTTCTCGAACCTTTTGGCCTGGTTGAAGAGG |
| | | | GTGCTAAGACGGCCCCTACCGGAAAGCGGATAGACGACCACTTTCCAAAA |
| | | | AGAAAGAAGGCTCGGACCGAAGAGGACTCCAAGCCTTCCACCTCGTCAGA |
| | | | CGCCGAAGCTGGACCCAGCGGATCCCAGCAGCTGCAAATCCCAGCCCAAC |
| | | | CAGCCTCAAGTTTGGGAGCTGATACAATGTCTGCGGGAGGTGGCGGCCCA |
| | | | TTGGGCGACAATAACCAAGGTGCCGATGGAGTGGGCAATGCCTCGGGAGA |
| | | | TTGGCATTGCGATTCCACGTGGATGGGGGACAGAGTCGTCACCAAGTCCA |
| | | | CCCGAACCTGGGTGCTGCCCAGCTACAACAACCACCAGTACCGAGAGATC |
| | | | AAAAGCGGCTCCGTCGACGGAAGCAACGCCAACGCCTACTTTGGATACAG |
| | | | CACCCCCTGGGGGTACTTTGACTTTAACCGCTTCCACAGCCACTGGAGCC |
| | | | CCCGAGACTGGCAAAGACTCATCAACAACTACTGGGGCTTCAGACCCCGG |
| | | | TCCCTCAGAGTCAAAATCTTCAACATTCAAGTCAAAGAGGTCACGGTGCA |
| | | | GGACTCCACCACCACCATCGCCAACAACCTCACCTCCACCGTCCAAGTGT |
| | | | TTACGGACGACGACTACCAGCTGCCCTACGTCGTCGGCAACGGGACCGAG |
| | | | GGATGCCTGCCGGCCTTCCCTCCGCAGGTCTTTACGCTGCCGCAGTACGG |
| | | | TTACGCGACGCTGAACCGCGACAACACAGAAAATCCCACCGAGAGGAGCA |
| | | | GCTTCTTCTGCCTAGAGTACTTTCCCAGCAAGATGCTGAGAACGGGCAAC |
| | | | AACTTTGAGTTTACCTACAACTTTGAGGAGGTGCCCTTCCACTCCAGCTT |
| | | | CGCTCCCAGTCAGAACCTGTTCAAGCTGGCCAACCCGCTGGTGGACCAGT |
| | | | ACTTGTACCGCTTCGTGAGCACAAATAACACTGGCGGAGTCCAGTTCAAC |
| | | | AAGAACCTGGCCGGGAGATACGCCAACACCTACAAAAACTGGTTCCCGGG |
| | | | GCCCATGGGCCGAACCCAGGGCTGGAACCTGGGCTCCGGGGTCAACCGCG |
| | | | CCAGTGTCAGCGCCTTCGCCACGACCAATAGGATGGAGCTCGAGGGCGCG |
| | | | AGTTACCAGGTGCCCCCGCAGCCGAACGGCATGACCAACAACCTCCAGGG |
| | | | CAGCAACACCTATGCCCTGGAGAACACTATGATCTTCAACAGCCAGCCGG |
| | | | CGAACCCGGGCACCACCGCCACGTACCTCGAGGGCAACATGCTCATCACC |
| | | | AGCGAGAGCGAGACACAGCCGGTGAACCGCGTGGCGTACAACGTCGGCGG |
| | | | GCAGATGGCCACCAACAACCAGAGCTCCACCACTGCCCCCGCGACCGGCA |
| | | | CGTACAACCTCCAGGAAATCGTGCCCGGCAGCGTGTGGATGGAGAGGGAC |
| | | | GTGTACCTCCAAGGACCCATCTGGGCCAAGATCCCAGAGACAGGGGCGCA |
| | | | CTTTCACCCCTCTCCGGCCATGGGCGGATTCGGACTCAAACACCCACCGC |
| | | | CCATGATGCTCATCAAGAACACGCCTGTGCCCGGAAATATCACCAGCTTC |
| | | | TCGGACGTGCCCGTCAGCAGCTTCATCACCCAGTACAGCACCGGGCAGGT |
| | | | CACCGTGGAGATGGAGTGGGAGCTCAAGAAGGAAAACTCCAAGAGGTGGA |
| | | | ACCCAGAGATCCAGTACACAAACAACTACAACGACCCCCAGTTTGTGGAC |
| | | | TTTGCCCCGGACAGCACCGGGGAATACAGAACCACCAGACCTATCGGAAC |
| | | | CCGATACCTTACCCGACCCCTTTAA |
| 267 | 67 | MAAP_aa | MTLVVLCCLVIVISDPSTGSIKESLSTRQTRSRESTTSRTTSSLRRETTP |
| | | | TSSTTTRTPSFRRSSPTTHPSGETSERQSFRPRKGFSNLLAWLKRVLRRP |
| | | | LPESG* |
| 268 | 67 | MAAP_nt | ATGACTCTCGTGGTCTTGTGCTGCCTGGTTATCGTTATCTCGGACCCTTC |
| | | | AACGGGCTCGATAAAGGAGAGCCTGTCAACGAGGCAGACGAGGTCGCGCG |
| | | | AGAGCACGACATCTCGTACAACGAGCAGCTTGAGGCGGGAGACAACCCCT |
| | | | ACCTCAAGTACAACCACGCGGACGCCGAGTTTCAGGAGAAGCTCGCCGAC |
| | | | GACACATCCTTCGGGGGAAACCTCGGAAAGGCAGTCTTTCAGGCCAAGAA |
| | | | AAGGGTTCTCGAACCTTTTGGCCTGGTTGAAGAGGGTGCTAAGACGGCCC |
| | | | CTACCGGAAAGCGGATAG |
| 269 | 68 | VP1_aa | MSFVDHPPDWLEEVGEGLREFLGLEAGPPKPKPVQQISEKSPGARGLVLP |
| | | | GYNYLGPGNSLDRGEPVNEADEVAREHDISYNEQLEAGDNPYLKYNHADA |
| | | | EFQEKLADDTSFGGNLGKAVFQAKKRVLEPFGLVEEGAKTAPTGKRIDDH |
| | | | FPKRKKARTEEDSKPSTSSDAEAGPSGSQQLQIPAQPASSLGADTMSAGG |
| | | | GGPLGDNNQGADGVGNASGDWHCDSTWMGDRVVTKSTRTWVLPSYNNHQY |
| | | | REIKSGSVDGSNANAYFGYSTPWGYFDFNRFHSHWSPRDWQRLINNYWGF |
| | | | RPRSLRVKIFNIQVKEVTVQDSTTTIANNLTSTVQVFTDDDYQLPYVVGN |
| | | | GTEGCLPAFPPQVFTLPQYGYATLNRDNTENPTERSSFFCLEYFPSKMLR |
| | | | TGNNFEFTYNFEEVPFHSSFAPSQNLFKLANPLVDQYLYRFVSTNNTGGV |
| | | | QFNKNLAGRYANTYKNWFPGPMGRTQGWNLGSGVNRASVSAFATTNRMEL |
| | | | EGASYQVPPQPNGMTNNLQGSNTYALENTMIFNSQPANPGTTATYLEGNM |
| | | | LITSESETQPVNRVAYNVGGQMATNNQSSTTAPATGTYNLQEIVPGSVWM |
| | | | ERDVYLQGPIWAKIPETGAHFHPSPAMGGFGLKHPPPMMLIKNTPVPGNI |
| | | | TSFSDVPVSSFITQYSTGQVTVEMEWELKKENSKRWNPEIQYTNNYNDPQ |
| | | | FVDFAPDSTGEYRTTRPIGTRYLTRPL* |
| 270 | 68 | VP1_nt | ATGTCTTTTGTTGATCACCCTCCAGATTGGTTGGAAGAAGTTGGTGAAGG |
| | | | TCTTCGCGAGTTTTTGGGCCTTGAAGCGGGCCCACCGAAACCAAAACCCG |
| | | | TCCAGCAAATATCTGAAAAAAGCCCTGGCGCCCGTGGTCTTGTGCTGCCT |
| | | | GGTTATAACTATCTCGGACCCGGAAACAGCCTCGATCGAGGAGAGCCTGT |
| | | | CAACGAAGCAGACGAGGTCGCGCGAGAGCACGACATCTCGTACAACGAGC |
| | | | AGCTTGAGGCGGGAGACAACCCCTACCTCAAGTACAACCACGCGGACGCC |
| | | | GAGTTTCAGGAGAAGCTCGCCGACGACACATCCTTCGGGGGAAACCTCGG |
| | | | AAAGGCAGTCTTTCAGGCCAAGAAAAGGGTTCTCGAACCTTTTGGCCTGG |
| | | | TTGAAGAGGGTGCTAAGACGGCCCCTACCGGAAAGCGGATAGACGACCAC |
| | | | TTTCCAAAAAGAAAGAAGGCTCGGACCGAAGAGGACTCCAAGCCTTCCAC |
| | | | CTCGTCAGACGCCGAAGCTGGACCCAGCGGATCCCAGCAGCTGCAAATCC |
| | | | CAGCCCAACCAGCCTCAAGTTTGGGAGCTGATACAATGTCTGCGGGAGGT |
| | | | GGCGGCCCATTGGGCGACAATAACCAAGGTGCCGATGGAGTGGGCAATGC |
| | | | CTCGGGAGATTGGCATTGCGATTCCACGTGGATGGGGGACAGAGTCGTCA |
| | | | CCAAGTCCACCCGAACCTGGGTGCTGCCCAGCTACAACAACCACCAGTAC |
| | | | CGAGAGATCAAAAGCGGCTCCGTCGACGGAAGCAACGCCAACGCCTACTT |
| | | | TGGATACAGCACCCCCTGGGGGTACTTTGACTTTAACCGCTTCCACAGCC |
| | | | ACTGGAGCCCCCGAGACTGGCAAAGACTCATCAACAACTACTGGGGCTTC |
| | | | AGACCCCGGTCCCTCAGAGTCAAAATCTTCAACATTCAAGTCAAAGAGGT |
| | | | CACGGTGCAGGACTCCACCACCACCATCGCCAACAACCTCACCTCCACCG |
| | | | TCCAAGTGTTTACGGACGACGACTACCAGCTGCCCTACGTCGTCGGCAAC |
| | | | GGGACCGAGGGATGCCTGCCGGCCTTCCCTCCGCAGGTCTTTACGCTGCC |
| | | | GCAGTACGGTTACGCGACGCTGAACCGCGACAACACAGAAAATCCCACCG |
| | | | AGAGGAGCAGCTTCTTCTGCCTAGAGTACTTTCCCAGCAAGATGCTGAGA |
| | | | ACGGGCAACAACTTTGAGTTTACCTACAACTTTGAGGAGGTGCCCTTCCA |
| | | | CTCCAGCTTCGCTCCCAGTCAGAACCTGTTCAAGCTGGCCAACCCGCTGG |
| | | | TGGACCAGTACTTGTACCGCTTCGTGAGCACAAATAACACTGGCGGAGTC |
| | | | CAGTTCAACAAGAACCTGGCCGGGAGATACGCCAACACCTACAAAAACTG |
| | | | GTTCCCGGGGCCCATGGGCCGAACCCAGGGCTGGAACCTGGGCTCCGGGG |
| | | | TCAACCGCGCCAGTGTCAGCGCCTTCGCCACGACCAATAGGATGGAGCTC |
| | | | GAGGGCGCGAGTTACCAGGTGCCCCCGCAGCCGAACGGCATGACCAACAA |
| | | | CCTCCAGGGCAGCAACACCTATGCCCTGGAGAACACTATGATCTTCAACA |
| | | | GCCAGCCGGCGAACCCGGGCACCACCGCCACGTACCTCGAGGGCAACATG |
| | | | CTCATCACCAGCGAGAGCGAGACACAGCCGGTGAACCGCGTGGCGTACAA |
| | | | CGTCGGCGGGCAGATGGCCACCAACAACCAGAGCTCCACCACTGCCCCCG |
| | | | CGACCGGCACGTACAACCTCCAGGAAATCGTGCCCGGCAGCGTGTGGATG |
| | | | GAGAGGGACGTGTACCTCCAAGGACCCATCTGGGCCAAGATCCCAGAGAC |
| | | | AGGGGCGCACTTTCACCCCTCTCCGGCCATGGGCGGATTCGGACTCAAAC |
| | | | ACCCACCGCCCATGATGCTCATCAAGAACACGCCTGTGCCCGGAAATATC |
| | | | ACCAGCTTCTCGGACGTGCCCGTCAGCAGCTTCATCACCCAGTACAGCAC |
| | | | CGGGCAGGTCACCGTGGAGATGGAGTGGGAGCTCAAGAAGGAAAACTCCA |
| | | | AGAGGTGGAACCCAGAGATCCAGTACACAAACAACTACAACGACCCCCAG |
| | | | TTTGTGGACTTTGCCCCGGACAGCACCGGGGAATACAGAACCACCAGACC |
| | | | TATCGGAACCCGATACCTTACCCGACCCCTTTAA |
| 271 | 68 | MAAP_aa | LKKALAPVVLCCLVITISDPETASIEESLSTKQTRSRESTTSRTTSSLRR |
| | | | ETTPTSSTTTRTPSFRRSSPTTHPSGETSERQSFRPRKGFSNLLAWLKRV |
| | | | LRRPLPESG* |
| 272 | 68 | MAAP_nt | CTGAAAAAAGCCCTGGCGCCCGTGGTCTTGTGCTGCCTGGTTATAACTAT |
| | | | CTCGGACCCGGAAACAGCCTCGATCGAGGAGAGCCTGTCAACGAAGCAGA |
| | | | CGAGGTCGCGCGAGAGCACGACATCTCGTACAACGAGCAGCTTGAGGCGG |
| | | | GAGACAACCCCTACCTCAAGTACAACCACGCGGACGCCGAGTTTCAGGAG |
| | | | AAGCTCGCCGACGACACATCCTTCGGGGGAAACCTCGGAAAGGCAGTCTT |
| | | | TCAGGCCAAGAAAAGGGTTCTCGAACCTTTTGGCCTGGTTGAAGAGGGTG |
| | | | CTAAGACGGCCCCTACCGGAAAGCGGATAG |
| 273 | 69 | VP1_aa | MSFVDHPPDWLEEVGEGLREFLGLEAGPPKPKPNDQHQDQARGLVLPGYN |
| | | | YLGPGNGLDRGEPVNRADEVAREHDISYNEQLEAGDNPYLKYNHADAEFQ |
| | | | EKLADDTSFGGNLGKAVFQAKKRVLEPFGLVEEGAKTAPTGKRIDDHFPK |
| | | | RKKARTEEDSKPSTSSDAEAGPSGSQQLQIPAQPASSLGADTMSAGGGGP |
| | | | LGDNNQGADGVGNASGDWHCDSTWMGDRVVTKSTRTWVLPSYNNHQYREI |
| | | | KSGSVDGSNANAYFGYSTPWGYFDFNRFHSHWSPRDWQRLINNYWGFRPR |
| | | | SLRVKIFNIQVKEVTVQDSTTTIANNLTSTVQVFTDDDYQLPYVVGNGTE |
| | | | GCLPAFPPQVFTLPQYGYATLNRDNTENPTERSSFFCLEYFPSKMLRTGN |
| | | | NFEFTYNFEEVPFHSSFAPSQNLFKLANPLVDQYLYRFVSTNNTGGVQFN |
| | | | KNLAGRYANTYKNWFPGPMGRTQGWNLGSGVNRASVSAFATTNRMELEGA |
| | | | SYQVPPQPNGMTNNLQGSNTYALENTMIFNSQPANPGTTATYLEGNMLIT |
| | | | SESETQPVNRVAYNVGGQMATNNQSSTTAPATGTYNLQEIVPGSVWMERD |
| | | | VYLQGPIWAKIPETGAHFHPSPAMGGFGLKHPPPMMLIKNTPVPGNITSF |
| | | | SDVPVSSFITQYSTGQVTVEMEWELKKENSKRWNPEIQYTNNYNDPQFVD |
| | | | FAPDSTGEYRTTRPIGTRYLTRPL* |
| 274 | 69 | VP1_nt | ATGTCTTTTGTTGATCACCCTCCAGATTGGTTGGAAGAAGTTGGTGAAGG |
| | | | TCTTCGCGAGTTTTTGGGCCTTGAAGCGGGCCCACCGAAACCAAAACCCA |
| | | | ATGACCAGCATCAAGATCAAGCCCGTGGTCTTGTGCTGCCTGGTTATAAC |
| | | | TATCTCGGACCCGGAAACGGGCTCGATCGAGGAGAGCCTGTCAACAGGGC |
| | | | AGACGAGGTCGCGCGAGAGCACGACATCTCGTACAACGAGCAGCTTGAGG |
| | | | CGGGAGACAACCCCTACCTCAAGTACAACCACGCGGACGCCGAGTTTCAG |
| | | | GAGAAGCTCGCCGACGACACATCCTTCGGGGGAAACCTCGGAAAGGCAGT |
| | | | CTTTCAGGCCAAGAAAAGGGTTCTCGAACCTTTTGGCCTGGTTGAAGAGG |
| | | | GTGCTAAGACGGCCCCTACCGGAAAGCGGATAGACGACCACTTTCCAAAA |
| | | | AGAAAGAAGGCTCGGACCGAAGAGGACTCCAAGCCTTCCACCTCGTCAGA |
| | | | CGCCGAAGCTGGACCCAGCGGATCCCAGCAGCTGCAAATCCCAGCCCAAC |
| | | | CAGCCTCAAGTTTGGGAGCTGATACAATGTCTGCGGGAGGTGGCGGCCCA |
| | | | TTGGGCGACAATAACCAAGGTGCCGATGGAGTGGGCAATGCCTCGGGAGA |
| | | | TTGGCATTGCGATTCCACGTGGATGGGGGACAGAGTCGTCACCAAGTCCA |
| | | | CCCGAACCTGGGTGCTGCCCAGCTACAACAACCACCAGTACCGAGAGATC |
| | | | AAAAGCGGCTCCGTCGACGGAAGCAACGCCAACGCCTACTTTGGATACAG |
| | | | CACCCCCTGGGGGTACTTTGACTTTAACCGCTTCCACAGCCACTGGAGCC |
| | | | CCCGAGACTGGCAAAGACTCATCAACAACTACTGGGGCTTCAGACCCCGG |
| | | | TCCCTCAGAGTCAAAATCTTCAACATTCAAGTCAAAGAGGTCACGGTGCA |
| | | | GGACTCCACCACCACCATCGCCAACAACCTCACCTCCACCGTCCAAGTGT |
| | | | TTACGGACGACGACTACCAGCTGCCCTACGTCGTCGGCAACGGGACCGAG |
| | | | GGATGCCTGCCGGCCTTCCCTCCGCAGGTCTTTACGCTGCCGCAGTACGG |
| | | | TTACGCGACGCTGAACCGCGACAACACAGAAAATCCCACCGAGAGGAGCA |
| | | | GCTTCTTCTGCCTAGAGTACTTTCCCAGCAAGATGCTGAGAACGGGCAAC |
| | | | AACTTTGAGTTTACCTACAACTTTGAGGAGGTGCCCTTCCACTCCAGCTT |
| | | | CGCTCCCAGTCAGAACCTGTTCAAGCTGGCCAACCCGCTGGTGGACCAGT |
| | | | ACTTGTACCGCTTCGTGAGCACAAATAACACTGGCGGAGTCCAGTTCAAC |
| | | | AAGAACCTGGCCGGGAGATACGCCAACACCTACAAAAACTGGTTCCCGGG |
| | | | GCCCATGGGCCGAACCCAGGGCTGGAACCTGGGCTCCGGGGTCAACCGCG |
| | | | CCAGTGTCAGCGCCTTCGCCACGACCAATAGGATGGAGCTCGAGGGCGCG |
| | | | AGTTACCAGGTGCCCCCGCAGCCGAACGGCATGACCAACAACCTCCAGGG |
| | | | CAGCAACACCTATGCCCTGGAGAACACTATGATCTTCAACAGCCAGCCGG |
| | | | CGAACCCGGGCACCACCGCCACGTACCTCGAGGGCAACATGCTCATCACC |
| | | | AGCGAGAGCGAGACACAGCCGGTGAACCGCGTGGCGTACAACGTCGGCGG |
| | | | GCAGATGGCCACCAACAACCAGAGCTCCACCACTGCCCCCGCGACCGGCA |
| | | | CGTACAACCTCCAGGAAATCGTGCCCGGCAGCGTGTGGATGGAGAGGGAC |
| | | | GTGTACCTCCAAGGACCCATCTGGGCCAAGATCCCAGAGACAGGGGCGCA |
| | | | CTTTCACCCCTCTCCGGCCATGGGCGGATTCGGACTCAAACACCCACCGC |
| | | | CCATGATGCTCATCAAGAACACGCCTGTGCCCGGAAATATCACCAGCTTC |
| | | | TCGGACGTGCCCGTCAGCAGCTTCATCACCCAGTACAGCACCGGGCAGGT |
| | | | CACCGTGGAGATGGAGTGGGAGCTCAAGAAGGAAAACTCCAAGAGGTGGA |
| | | | ACCCAGAGATCCAGTACACAAACAACTACAACGACCCCCAGTTTGTGGAC |
| | | | TTTGCCCCGGACAGCACCGGGGAATACAGAACCACCAGACCTATCGGAAC |
| | | | CCGATACCTTACCCGACCCCTTTAA |
| 275 | 69 | MAAP_aa | MTSIKIKPVVLCCLVITISDPETGSIEESLSTGQTRSRESTTSRTTSSLR |
| | | | RETTPTSSTTTRTPSFRRSSPTTHPSGETSERQSFRPRKGFSNLLAWLKR |
| | | | VLRRPLPESG* |
| 276 | 69 | MAAP_nt | ATGACCAGCATCAAGATCAAGCCCGTGGTCTTGTGCTGCCTGGTTATAAC |
| | | | TATCTCGGACCCGGAAACGGGCTCGATCGAGGAGAGCCTGTCAACAGGGC |
| | | | AGACGAGGTCGCGCGAGAGCACGACATCTCGTACAACGAGCAGCTTGAGG |
| | | | CGGGAGACAACCCCTACCTCAAGTACAACCACGCGGACGCCGAGTTTCAG |
| | | | GAGAAGCTCGCCGACGACACATCCTTCGGGGGAAACCTCGGAAAGGCAGT |
| | | | CTTTCAGGCCAAGAAAAGGGTTCTCGAACCTTTTGGCCTGGTTGAAGAGG |
| | | | GTGCTAAGACGGCCCCTACCGGAAAGCGGATAG |
| 277 | 70 | VP1_aa | MSFVDHPPDWLEEVGEGLREFLGLPAGPPKPKPNQQHQDQARGLVLPGYN |
| | | | YLGPGNGLDRGEPVNRADEVAREHDISYNEQLEAGDNPYLKYNHADAEFQ |
| | | | EKLADDTSFGGNLGKAVFQAKKRVLEPFGLVEEGAKTAPTGKRIDDHFPK |
| | | | RKKARTEEDSKPSTSSDAEAGPSGSQQLQIPAQPASSLGADTMSAGGGGP |
| | | | LGDNNQGADGVGNASGDWHCDSTWMGDRVVTKSTRTWVLPSYNNHQYREI |
| | | | KSGSVDGSNANAYFGYSTPWGYFDFNRFHSHWSPRDWQRLINNYWGFRPR |
| | | | SLRVKIFNIQVKEVTVQDSTTTIANNLTSTVQVFTDDDYQLPYVVGNGTE |
| | | | GCLPAFPPQVFTLPQYGYATLNRDNTENPTERSSFFCLEYFPSKMLRTGN |
| | | | NFEFTYNFEEVPFHSSFAPSQNLFKLANPLVDQYLYRFVSTNNTGGVQFN |
| | | | KNLAGRYANTYKNWFPGPMGRTQGWNLGSGVNRASVSAFATTNRMELEGA |
| | | | SYQVPPQPNGMTNNLQGSNTYALENTMIFNSQPANPGTTATYLEGNMLIT |
| | | | SESETQPVNRVAYNVGGQMATNNQSSTTAPATGTYNLQEIVPGSVWMERD |
| | | | VYLQGPIWAKIPETGAHFHPSPAMGGFGLKHPPPMMLIKNTPVPGNITSF |
| | | | SDVPVSSFITQYSTGQVTVEMEWELKKENSKRWNPEIQYTNNYNDPQFVD |
| | | | FAPDSTGEYRTTRPIGTRYLTRPL* |
| 278 | 70 | VP1_nt | ATGTCTTTTGTTGATCACCCTCCAGATTGGTTGGAAGAAGTTGGTGAAGG |
| | | | CCTTCGCGAGTTTTTGGGCCTTCCTGCGGGCCCACCGAAACCAAAACCCA |
| | | | ATCAGCAGCATCAAGATCAAGCCCGTGGTCTTGTGCTGCCTGGTTATAAC |
| | | | TATCTCGGACCCGGAAACGGGCTCGATCGAGGAGAGCCTGTCAACAGGGC |
| | | | AGACGAGGTCGCGCGAGAGCACGACATCTCGTACAACGAGCAGCTTGAGG |
| | | | CGGGAGACAACCCCTACCTCAAGTACAACCACGCGGACGCCGAGTTTCAG |
| | | | GAGAAGCTCGCCGACGACACATCCTTCGGGGGAAACCTCGGAAAGGCAGT |
| | | | CTTTCAGGCCAAGAAAAGGGTTCTCGAACCTTTTGGCCTGGTTGAAGAGG |
| | | | GTGCTAAGACGGCCCCTACCGGAAAGCGGATAGACGACCACTTTCCAAAA |
| | | | AGAAAGAAGGCTCGGACCGAAGAGGACTCCAAGCCTTCCACCTCGTCAGA |
| | | | CGCCGAAGCTGGACCCAGCGGATCCCAGCAGCTGCAAATCCCAGCCCAAC |
| | | | CAGCCTCAAGTTTGGGAGCTGATACAATGTCTGCGGGAGGTGGCGGCCCA |
| | | | TTGGGCGACAATAACCAAGGTGCCGATGGAGTGGGCAATGCCTCGGGAGA |
| | | | TTGGCATTGCGATTCCACGTGGATGGGGGACAGAGTCGTCACCAAGTCCA |
| | | | CCCGAACCTGGGTGCTGCCCAGCTACAACAACCACCAGTACCGAGAGATC |
| | | | AAAAGCGGCTCCGTCGACGGAAGCAACGCCAACGCCTACTTTGGATACAG |
| | | | CACCCCCTGGGGGTACTTTGACTTTAACCGCTTCCACAGCCACTGGAGCC |
| | | | CCCGAGACTGGCAAAGACTCATCAACAACTACTGGGGCTTCAGACCCCGG |
| | | | TCCCTCAGAGTCAAAATCTTCAACATTCAAGTCAAAGAGGTCACGGTGCA |
| | | | GGACTCCACCACCACCATCGCCAACAACCTCACCTCCACCGTCCAAGTGT |
| | | | TTACGGACGACGACTACCAGCTGCCCTACGTCGTCGGCAACGGGACCGAG |
| | | | GGATGCCTGCCGGCCTTCCCTCCGCAGGTCTTTACGCTGCCGCAGTACGG |
| | | | TTACGCGACGCTGAACCGCGACAACACAGAAAATCCCACCGAGAGGAGCA |
| | | | GCTTCTTCTGCCTAGAGTACTTTCCCAGCAAGATGCTGAGAACGGGCAAC |
| | | | AACTTTGAGTTTACCTACAACTTTGAGGAGGTGCCCTTCCACTCCAGCTT |
| | | | CGCTCCCAGTCAGAACCTGTTCAAGCTGGCCAACCCGCTGGTGGACCAGT |
| | | | ACTTGTACCGCTTCGTGAGCACAAATAACACTGGCGGAGTCCAGTTCAAC |
| | | | AAGAACCTGGCCGGGAGATACGCCAACACCTACAAAAACTGGTTCCCGGG |
| | | | GCCCATGGGCCGAACCCAGGGCTGGAACCTGGGCTCCGGGGTCAACCGCG |
| | | | CCAGTGTCAGCGCCTTCGCCACGACCAATAGGATGGAGCTCGAGGGCGCG |
| | | | AGTTACCAGGTGCCCCCGCAGCCGAACGGCATGACCAACAACCTCCAGGG |
| | | | CAGCAACACCTATGCCCTGGAGAACACTATGATCTTCAACAGCCAGCCGG |
| | | | CGAACCCGGGCACCACCGCCACGTACCTCGAGGGCAACATGCTCATCACC |
| | | | AGCGAGAGCGAGACACAGCCGGTGAACCGCGTGGCGTACAACGTCGGCGG |
| | | | GCAGATGGCCACCAACAACCAGAGCTCCACCACTGCCCCCGCGACCGGCA |
| | | | CGTACAACCTCCAGGAAATCGTGCCCGGCAGCGTGTGGATGGAGAGGGAC |
| | | | GTGTACCTCCAAGGACCCATCTGGGCCAAGATCCCAGAGACAGGGGCGCA |
| | | | CTTTCACCCCTCTCCGGCCATGGGCGGATTCGGACTCAAACACCCACCGC |
| | | | CCATGATGCTCATCAAGAACACGCCTGTGCCCGGAAATATCACCAGCTTC |
| | | | TCGGACGTGCCCGTCAGCAGCTTCATCACCCAGTACAGCACCGGGCAGGT |
| | | | CACCGTGGAGATGGAGTGGGAGCTCAAGAAGGAAAACTCCAAGAGGTGGA |
| | | | ACCCAGAGATCCAGTACACAAACAACTACAACGACCCCCAGTTTGTGGAC |
| | | | TTTGCCCCGGACAGCACCGGGGAATACAGAACCACCAGACCTATCGGAAC |
| | | | CCGATACCTTACCCGACCCCTTTAA |
| 279 | 70 | MAAP_aa | LRAHRNQNPISSIKIKPVVLCCLVITISDPETGSIEESLSTGQTRSREST |
| | | | TSRTTSSLRRETTPTSSTTTRTPSFRRSSPTTHPSGETSERQSFRPRKGF |
| | | | SNLLAWLKRVLRRPLPESG* |
| 280 | 70 | MAAP_nt | CTGCGGGCCCACCGAAACCAAAACCCAATCAGCAGCATCAAGATCAAGCC |
| | | | CGTGGTCTTGTGCTGCCTGGTTATAACTATCTCGGACCCGGAAACGGGCT |
| | | | CGATCGAGGAGAGCCTGTCAACAGGGCAGACGAGGTCGCGCGAGAGCACG |
| | | | ACATCTCGTACAACGAGCAGCTTGAGGCGGGAGACAACCCCTACCTCAAG |
| | | | TACAACCACGCGGACGCCGAGTTTCAGGAGAAGCTCGCCGACGACACATC |
| | | | CTTCGGGGGAAACCTCGGAAAGGCAGTCTTTCAGGCCAAGAAAAGGGTTC |
| | | | TCGAACCTTTTGGCCTGGTTGAAGAGGGTGCTAAGACGGCCCCTACCGGA |
| | | | AAGCGGATAG |
| 281 | 71 | VP1_aa | MSFVDHPPDWLEEVGEGLREFLGLEAGPPKPKPNQQHQDQARGLVLPGYV |
| | | | YLGPGNGLHRGVPVNRADEVAREHDISYNEQLEAGDNPYLKYNHADAEFQ |
| | | | EKLADDTSFGGNLGKAVFQAKKRVLEPFGLVEEGAKTAPTGKRIDDHFPK |
| | | | RKKARTEEDSKPSTSSDAEAGPSGSQQLQIPAQPASSLGADTMSAGGGGP |
| | | | LGDNNQGADGVGNASGDWHCDSTWMGDRVVTKSTRTWVLPSYNNHQYREI |
| | | | KSGSVDGSNANAYFGYSTPWGYFDFNRFHSHWSPRDWQRLINNYWGFRPR |
| | | | SLRVKIFNIQVKEVTVQDSTTTIANNLTSTVQVFTDDDYQLPYVVGNGTE |
| | | | GCLPAFPPQVFTLPQYGYATLNRDNTENPTERSSFFCLEYFPSKMLRTGN |
| | | | NFEFTYNFEEVPFHSSFAPSQNLFKLANPLVDQYLYRFVSTNNTGGVQFN |
| | | | KNLAGRYANTYKNWFPGPMGRTQGWNLGSGVNRASVSAFATTNRMELEGA |
| | | | SYQVPPQPNGMTNNLQGSNTYALENTMIFNSQPANPGTTATYLEGNMLIT |
| | | | SESETQPVNRVAYNVGGQMATNNQSSTTAPATGTYNLQEIVPGSVWMERD |
| | | | VYLQGPIWAKIPETGAHFHPSPAMGGFGLKHPPPMMLIKNTPVPGNITSF |
| | | | SDVPVSSFITQYSTGQVTVEMEWELKKENSKRWNPEIQYTNNYNDPQFVD |
| | | | FAPDSTGEYRTTRPIGTRYLTRPL* |
| 282 | 71 | VP1_nt | ATGTCTTTTGTTGATCACCCTCCAGATTGGTTGGAAGAAGTTGGTGAAGG |
| | | | TCTTCGCGAGTTTTTGGGCCTTGAAGCGGGCCCACCGAAACCAAAACCCA |
| | | | ATCAGCAGCATCAAGATCAAGCCCGTGGTCTTGTGCTGCCTGGTTATGTG |
| | | | TATCTCGGACCCGGAAACGGGCTCCACCGAGGAGTTCCTGTCAACAGGGC |
| | | | AGACGAGGTCGCGCGAGAGCACGACATCTCGTACAACGAGCAGCTTGAGG |
| | | | CGGGAGACAACCCCTACCTCAAGTACAACCACGCGGACGCCGAGTTTCAG |
| | | | GAGAAGCTCGCCGACGACACATCCTTCGGGGGAAACCTCGGAAAGGCAGT |
| | | | CTTTCAGGCCAAGAAAAGGGTTCTCGAACCTTTTGGCCTGGTTGAAGAGG |
| | | | GTGCTAAGACGGCCCCTACCGGAAAGCGGATAGACGACCACTTTCCAAAA |
| | | | AGAAAGAAGGCTCGGACCGAAGAGGACTCCAAGCCTTCCACCTCGTCAGA |
| | | | CGCCGAAGCTGGACCCAGCGGATCCCAGCAGCTGCAAATCCCAGCCCAAC |
| | | | CAGCCTCAAGTTTGGGAGCTGATACAATGTCTGCGGGAGGTGGCGGCCCA |
| | | | TTGGGCGACAATAACCAAGGTGCCGATGGAGTGGGCAATGCCTCGGGAGA |
| | | | TTGGCATTGCGATTCCACGTGGATGGGGGACAGAGTCGTCACCAAGTCCA |
| | | | CCCGAACCTGGGTGCTGCCCAGCTACAACAACCACCAGTACCGAGAGATC |
| | | | AAAAGCGGCTCCGTCGACGGAAGCAACGCCAACGCCTACTTTGGATACAG |
| | | | CACCCCCTGGGGGTACTTTGACTTTAACCGCTTCCACAGCCACTGGAGCC |
| | | | CCCGAGACTGGCAAAGACTCATCAACAACTACTGGGGCTTCAGACCCCGG |
| | | | TCCCTCAGAGTCAAAATCTTCAACATTCAAGTCAAAGAGGTCACGGTGCA |
| | | | GGACTCCACCACCACCATCGCCAACAACCTCACCTCCACCGTCCAAGTGT |
| | | | TTACGGACGACGACTACCAGCTGCCCTACGTCGTCGGCAACGGGACCGAG |
| | | | GGATGCCTGCCGGCCTTCCCTCCGCAGGTCTTTACGCTGCCGCAGTACGG |
| | | | TTACGCGACGCTGAACCGCGACAACACAGAAAATCCCACCGAGAGGAGCA |
| | | | GCTTCTTCTGCCTAGAGTACTTTCCCAGCAAGATGCTGAGAACGGGCAAC |
| | | | AACTTTGAGTTTACCTACAACTTTGAGGAGGTGCCCTTCCACTCCAGCTT |
| | | | CGCTCCCAGTCAGAACCTGTTCAAGCTGGCCAACCCGCTGGTGGACCAGT |
| | | | ACTTGTACCGCTTCGTGAGCACAAATAACACTGGCGGAGTCCAGTTCAAC |
| | | | AAGAACCTGGCCGGGAGATACGCCAACACCTACAAAAACTGGTTCCCGGG |
| | | | GCCCATGGGCCGAACCCAGGGCTGGAACCTGGGCTCCGGGGTCAACCGCG |
| | | | CCAGTGTCAGCGCCTTCGCCACGACCAATAGGATGGAGCTCGAGGGCGCG |
| | | | AGTTACCAGGTGCCCCCGCAGCCGAACGGCATGACCAACAACCTCCAGGG |
| | | | CAGCAACACCTATGCCCTGGAGAACACTATGATCTTCAACAGCCAGCCGG |
| | | | CGAACCCGGGCACCACCGCCACGTACCTCGAGGGCAACATGCTCATCACC |
| | | | AGCGAGAGCGAGACACAGCCGGTGAACCGCGTGGCGTACAACGTCGGCGG |
| | | | GCAGATGGCCACCAACAACCAGAGCTCCACCACTGCCCCCGCGACCGGCA |
| | | | CGTACAACCTCCAGGAAATCGTGCCCGGCAGCGTGTGGATGGAGAGGGAC |
| | | | GTGTACCTCCAAGGACCCATCTGGGCCAAGATCCCAGAGACAGGGGCGCA |
| | | | CTTTCACCCCTCTCCGGCCATGGGCGGATTCGGACTCAAACACCCACCGC |
| | | | CCATGATGCTCATCAAGAACACGCCTGTGCCCGGAAATATCACCAGCTTC |
| | | | TCGGACGTGCCCGTCAGCAGCTTCATCACCCAGTACAGCACCGGGCAGGT |
| | | | CACCGTGGAGATGGAGTGGGAGCTCAAGAAGGAAAACTCCAAGAGGTGGA |
| | | | ACCCAGAGATCCAGTACACAAACAACTACAACGACCCCCAGTTTGTGGAC |
| | | | TTTGCCCCGGACAGCACCGGGGAATACAGAACCACCAGACCTATCGGAAC |
| | | | CCGATACCTTACCCGACCCCTTTAA |
| 283 | 71 | MAAP_aa | MCISDPETGSTEEFLSTGQTRSRESTTSRTTSSLRRETTPTSSTTTRTPS |
| | | | FRRSSPTTHPSGETSERQSFRPRKGFSNLLAWLKRVLRRPLPESG* |
| 284 | 71 | MAAP_nt | ATGTGTATCTCGGACCCGGAAACGGGCTCCACCGAGGAGTTCCTGTCAAC |
| | | | AGGGCAGACGAGGTCGCGCGAGAGCACGACATCTCGTACAACGAGCAGCT |
| | | | TGAGGCGGGAGACAACCCCTACCTCAAGTACAACCACGCGGACGCCGAGT |
| | | | TTCAGGAGAAGCTCGCCGACGACACATCCTTCGGGGGAAACCTCGGAAAG |
| | | | GCAGTCTTTCAGGCCAAGAAAAGGGTTCTCGAACCTTTTGGCCTGGTTGA |
| | | | AGAGGGTGCTAAGACGGCCCCTACCGGAAAGCGGATAG |
| 285 | 72 | VP1_aa | MSFVDHPPDWLEEVGEGLREFLGLEAGPPKPKPAEQHKDDARGLVLPGYN |
| | | | YLGPFNGLDKGEPVNEADEVAREHDISYNEQLEAGDNPYLKYNHADAEFQ |
| | | | EKLADDTSFGGNLGKAVFQAKKRVLEPFGLVEEGAKTAPTGKRIDDHFPK |
| | | | RKKARTEEDSKPSTSSDAEAGPSGSQQLQIPAQPASSLGADTMSAGGGGP |
| | | | LGDNNQGADGVGNASGDWHCDSTWMGDRVVTKSTRTWVLPSYNNHQYREI |
| | | | KSGSVDGSNANAYFGYSTPWGYFDFNRFHSHWSPRDWQRLINNYWGFRPR |
| | | | SLRVKIFNIQVKEVTVQDSTTTIANNLTSTVQVFTDDDYQLPYVVGNGTE |
| | | | GCLPAFPPQVFTLPQYGYATLNRDNTENPTERSSFFCLEYFPSKMLRTGN |
| | | | NFEFTYNFEEVPFHSSFAPSQNLFKLANPLVDQYLYRFVSTNNTGGVQFN |
| | | | KNLAGRYANTYKNWFPGPMGRTQGWNLGSGVNRASVSAFATTNRMELEGA |
| | | | SYQVPPQPNGMTNNLQGSNTYALENTMIFNSQPANPGTTATYLEGNMLIT |
| | | | SESETQPVNRVAYNVGGQMATNNQSSTTAPATGTYNLQEIVPGSVWMERD |
| | | | VYLQGPIWAKIPETGAHFHPSPAMGGFGLKHPPPMMLIKNTPVPGNITSF |
| | | | SDVPVSSFITQYSTGQVTVEMEWELKKENSKRWNPEIQYTNNYNDPQFVD |
| | | | FAPDSTGEYRTTRPIGTRYLTRPL* |
| 286 | 72 | VP1_nt | ATGTCTTTTGTTGATCACCCTCCAGATTGGTTGGAAGAAGTTGGTGAAGG |
| | | | TCTTCGCGAGTTTTTGGGCCTTGAAGCGGGCCCACCGAAACCAAAACCCG |
| | | | CCGAACAGCATAAGGATGACGCCCGTGGTCTTGTGCTGCCTGGTTATAAC |
| | | | TATCTCGGACCCTTCAACGGGCTCGATAAAGGAGAGCCTGTCAACGAAGC |
| | | | AGACGAGGTCGCGCGAGAGCACGACATCTCGTACAACGAGCAGCTTGAGG |
| | | | CGGGAGACAACCCCTACCTCAAGTACAACCACGCGGACGCCGAGTTTCAG |
| | | | GAGAAGCTCGCCGACGACACATCCTTCGGGGGAAACCTCGGAAAGGCAGT |
| | | | CTTTCAGGCCAAGAAAAGGGTTCTCGAACCTTTTGGCCTGGTTGAAGAGG |
| | | | GTGCTAAGACGGCCCCTACCGGAAAGCGGATAGACGACCACTTTCCAAAA |
| | | | AGAAAGAAGGCTCGGACCGAAGAGGACTCCAAGCCTTCCACCTCGTCAGA |
| | | | CGCCGAAGCTGGACCCAGCGGATCCCAGCAGCTGCAAATCCCAGCCCAAC |
| | | | CAGCCTCAAGTTTGGGAGCTGATACAATGTCTGCGGGAGGTGGCGGCCCA |
| | | | TTGGGCGACAATAACCAAGGTGCCGATGGAGTGGGCAATGCCTCGGGAGA |
| | | | TTGGCATTGCGATTCCACGTGGATGGGGGACAGAGTCGTCACCAAGTCCA |
| | | | CCCGAACCTGGGTGCTGCCCAGCTACAACAACCACCAGTACCGAGAGATC |
| | | | AAAAGCGGCTCCGTCGACGGAAGCAACGCCAACGCCTACTTTGGATACAG |
| | | | CACCCCCTGGGGGTACTTTGACTTTAACCGCTTCCACAGCCACTGGAGCC |
| | | | CCCGAGACTGGCAAAGACTCATCAACAACTACTGGGGCTTCAGACCCCGG |
| | | | TCCCTCAGAGTCAAAATCTTCAACATTCAAGTCAAAGAGGTCACGGTGCA |
| | | | GGACTCCACCACCACCATCGCCAACAACCTCACCTCCACCGTCCAAGTGT |
| | | | TTACGGACGACGACTACCAGCTGCCCTACGTCGTCGGCAACGGGACCGAG |
| | | | GGATGCCTGCCGGCCTTCCCTCCGCAGGTCTTTACGCTGCCGCAGTACGG |
| | | | TTACGCGACGCTGAACCGCGACAACACAGAAAATCCCACCGAGAGGAGCA |
| | | | GCTTCTTCTGCCTAGAGTACTTTCCCAGCAAGATGCTGAGAACGGGCAAC |
| | | | AACTTTGAGTTTACCTACAACTTTGAGGAGGTGCCCTTCCACTCCAGCTT |
| | | | CGCTCCCAGTCAGAACCTGTTCAAGCTGGCCAACCCGCTGGTGGACCAGT |
| | | | ACTTGTACCGCTTCGTGAGCACAAATAACACTGGCGGAGTCCAGTTCAAC |
| | | | AAGAACCTGGCCGGGAGATACGCCAACACCTACAAAAACTGGTTCCCGGG |
| | | | GCCCATGGGCCGAACCCAGGGCTGGAACCTGGGCTCCGGGGTCAACCGCG |
| | | | CCAGTGTCAGCGCCTTCGCCACGACCAATAGGATGGAGCTCGAGGGCGCG |
| | | | AGTTACCAGGTGCCCCCGCAGCCGAACGGCATGACCAACAACCTCCAGGG |
| | | | CAGCAACACCTATGCCCTGGAGAACACTATGATCTTCAACAGCCAGCCGG |
| | | | CGAACCCGGGCACCACCGCCACGTACCTCGAGGGCAACATGCTCATCACC |
| | | | AGCGAGAGCGAGACACAGCCGGTGAACCGCGTGGCGTACAACGTCGGCGG |
| | | | GCAGATGGCCACCAACAACCAGAGCTCCACCACTGCCCCCGCGACCGGCA |
| | | | CGTACAACCTCCAGGAAATCGTGCCCGGCAGCGTGTGGATGGAGAGGGAC |
| | | | GTGTACCTCCAAGGACCCATCTGGGCCAAGATCCCAGAGACAGGGGCGCA |
| | | | CTTTCACCCCTCTCCGGCCATGGGCGGATTCGGACTCAAACACCCACCGC |
| | | | CCATGATGCTCATCAAGAACACGCCTGTGCCCGGAAATATCACCAGCTTC |
| | | | TCGGACGTGCCCGTCAGCAGCTTCATCACCCAGTACAGCACCGGGCAGGT |
| | | | CACCGTGGAGATGGAGTGGGAGCTCAAGAAGGAAAACTCCAAGAGGTGGA |
| | | | ACCCAGAGATCCAGTACACAAACAACTACAACGACCCCCAGTTTGTGGAC |
| | | | TTTGCCCCGGACAGCACCGGGGAATACAGAACCACCAGACCTATCGGAAC |
| | | | CCGATACCTTACCCGACCCCTTTAA |
| 287 | 72 | MAAP_aa | MTPVVLCCLVITISDPSTGSIKESLSTKQTRSRESTTSRTTSSLRRETTP |
| | | | TSSTTTRTPSFRRSSPTTHPSGETSERQSFRPRKGFSNLLAWLKRVLRRP |
| | | | LPESG* |
| 288 | 72 | MAAP_nt | ATGACGCCCGTGGTCTTGTGCTGCCTGGTTATAACTATCTCGGACCCTTC |
| | | | AACGGGCTCGATAAAGGAGAGCCTGTCAACGAAGCAGACGAGGTCGCGCG |
| | | | AGAGCACGACATCTCGTACAACGAGCAGCTTGAGGCGGGAGACAACCCCT |
| | | | ACCTCAAGTACAACCACGCGGACGCCGAGTTTCAGGAGAAGCTCGCCGAC |
| | | | GACACATCCTTCGGGGGAAACCTCGGAAAGGCAGTCTTTCAGGCCAAGAA |
| | | | AAGGGTTCTCGAACCTTTTGGCCTGGTTGAAGAGGGTGCTAAGACGGCCC |
| | | | CTACCGGAAAGCGGATAG |
| 289 | 73 | VP1_aa | MSFVDHPPDWLEEVGEGLREFLGLEAGPPKPKPAEQHKDDARGLVLPGYK |
| | | | YLGPGNGLDRGEPVNRADEVAREHDISYNEQLEAGDNPYLKYNHADAEFQ |
| | | | EKLADDTSFGGNLGKAVFQAKKRVLEPFGLVEEGAKTAPTGKRIDDHFPK |
| | | | RKKARTEEDSKPSTSSDAEAGPSGSQQLQIPAQPASSLGADTMSAGGGGP |
| | | | LGDNNQGADGVGNASGDWHCDSTWMGDRVVTKSTRTWVLPSYNNHQYREI |
| | | | KSGSVDGSNANAYFGYSTPWGYFDFNRFHSHWSPRDWQRLINNYWGFRPR |
| | | | SLRVKIFNIQVKEVTVQDSTTTIANNLTSTVQVFTDDDYQLPYVVGNGTE |
| | | | GCLPAFPPQVFTLPQYGYATLNRDNTENPTERSSFFCLEYFPSKMLRTGN |
| | | | NFEFTYNFEEVPFHSSFAPSQNLFKLANPLVDQYLYRFVSTNNTGGVQFN |
| | | | KNLAGRYANTYKNWFPGPMGRTQGWNLGSGVNRASVSAFATTNRMELEGA |
| | | | SYQVPPQPNGMTNNLQGSNTYALENTMIFNSQPANPGTTATYLEGNMLIT |
| | | | SESETQPVNRVAYNVGGQMATNNQSSTTAPATGTYNLQEIVPGSVWMERD |
| | | | VYLQGPIWAKIPETGAHFHPSPAMGGFGLKHPPPMMLIKNTPVPGNITSF |
| | | | SDVPVSSFITQYSTGQVTVEMEWELKKENSKRWNPEIQYTNNYNDPQFVD |
| | | | FAPDSTGEYRTTRPIGTRYLTRPL* |
| 290 | 73 | VP1_nt | ATGTCTTTTGTTGATCACCCTCCAGATTGGTTGGAAGAAGTTGGTGAAGG |
| | | | TCTTCGCGAGTTTTTGGGCCTTGAAGCGGGCCCACCGAAACCAAAACCCG |
| | | | CCGAGCAGCATAAAGATGATGCCCGTGGTCTTGTGCTGCCTGGTTATAAG |
| | | | TATCTCGGACCCGGAAACGGGCTCGATCGAGGAGAGCCTGTCAACAGGGC |
| | | | AGACGAGGTCGCGCGAGAGCACGACATCTCGTACAACGAGCAGCTTGAGG |
| | | | CGGGAGACAACCCCTACCTCAAGTACAACCACGCGGACGCCGAGTTTCAG |
| | | | GAGAAGCTCGCCGACGACACATCCTTCGGGGGAAACCTCGGAAAGGCAGT |
| | | | CTTTCAGGCCAAGAAAAGGGTTCTCGAACCTTTTGGCCTGGTTGAAGAGG |
| | | | GTGCTAAGACGGCCCCTACCGGAAAGCGGATAGACGACCACTTTCCAAAA |
| | | | AGAAAGAAGGCTCGGACCGAAGAGGACTCCAAGCCTTCCACCTCGTCAGA |
| | | | CGCCGAAGCTGGACCCAGCGGATCCCAGCAGCTGCAAATCCCAGCCCAAC |
| | | | CAGCCTCAAGTTTGGGAGCTGATACAATGTCTGCGGGAGGTGGCGGCCCA |
| | | | TTGGGCGACAATAACCAAGGTGCCGATGGAGTGGGCAATGCCTCGGGAGA |
| | | | TTGGCATTGCGATTCCACGTGGATGGGGGACAGAGTCGTCACCAAGTCCA |
| | | | CCCGAACCTGGGTGCTGCCCAGCTACAACAACCACCAGTACCGAGAGATC |
| | | | AAAAGCGGCTCCGTCGACGGAAGCAACGCCAACGCCTACTTTGGATACAG |
| | | | CACCCCCTGGGGGTACTTTGACTTTAACCGCTTCCACAGCCACTGGAGCC |
| | | | CCCGAGACTGGCAAAGACTCATCAACAACTACTGGGGCTTCAGACCCCGG |
| | | | TCCCTCAGAGTCAAAATCTTCAACATTCAAGTCAAAGAGGTCACGGTGCA |
| | | | GGACTCCACCACCACCATCGCCAACAACCTCACCTCCACCGTCCAAGTGT |
| | | | TTACGGACGACGACTACCAGCTGCCCTACGTCGTCGGCAACGGGACCGAG |
| | | | GGATGCCTGCCGGCCTTCCCTCCGCAGGTCTTTACGCTGCCGCAGTACGG |
| | | | TTACGCGACGCTGAACCGCGACAACACAGAAAATCCCACCGAGAGGAGCA |
| | | | GCTTCTTCTGCCTAGAGTACTTTCCCAGCAAGATGCTGAGAACGGGCAAC |
| | | | AACTTTGAGTTTACCTACAACTTTGAGGAGGTGCCCTTCCACTCCAGCTT |
| | | | CGCTCCCAGTCAGAACCTGTTCAAGCTGGCCAACCCGCTGGTGGACCAGT |
| | | | ACTTGTACCGCTTCGTGAGCACAAATAACACTGGCGGAGTCCAGTTCAAC |
| | | | AAGAACCTGGCCGGGAGATACGCCAACACCTACAAAAACTGGTTCCCGGG |
| | | | GCCCATGGGCCGAACCCAGGGCTGGAACCTGGGCTCCGGGGTCAACCGCG |
| | | | CCAGTGTCAGCGCCTTCGCCACGACCAATAGGATGGAGCTCGAGGGCGCG |
| | | | AGTTACCAGGTGCCCCCGCAGCCGAACGGCATGACCAACAACCTCCAGGG |
| | | | CAGCAACACCTATGCCCTGGAGAACACTATGATCTTCAACAGCCAGCCGG |
| | | | CGAACCCGGGCACCACCGCCACGTACCTCGAGGGCAACATGCTCATCACC |
| | | | AGCGAGAGCGAGACACAGCCGGTGAACCGCGTGGCGTACAACGTCGGCGG |
| | | | GCAGATGGCCACCAACAACCAGAGCTCCACCACTGCCCCCGCGACCGGCA |
| | | | CGTACAACCTCCAGGAAATCGTGCCCGGCAGCGTGTGGATGGAGAGGGAC |
| | | | GTGTACCTCCAAGGACCCATCTGGGCCAAGATCCCAGAGACAGGGGCGCA |
| | | | CTTTCACCCCTCTCCGGCCATGGGCGGATTCGGACTCAAACACCCACCGC |
| | | | CCATGATGCTCATCAAGAACACGCCTGTGCCCGGAAATATCACCAGCTTC |
| | | | TCGGACGTGCCCGTCAGCAGCTTCATCACCCAGTACAGCACCGGGCAGGT |
| | | | CACCGTGGAGATGGAGTGGGAGCTCAAGAAGGAAAACTCCAAGAGGTGGA |
| | | | ACCCAGAGATCCAGTACACAAACAACTACAACGACCCCCAGTTTGTGGAC |
| | | | TTTGCCCCGGACAGCACCGGGGAATACAGAACCACCAGACCTATCGGAAC |
| | | | CCGATACCTTACCCGACCCCTTTAA |
| 291 | 73 | MAAP_aa | MMPVVLCCLVISISDPETGSIEESLSTGQTRSRESTTSRTTSSLRRETTP |
| | | | TSSTTTRTPSFRRSSPTTHPSGETSERQSFRPRKGFSNLLAWLKRVLRRP |
| | | | LPESG* |
| 292 | 73 | MAAP_nt | ATGATGCCCGTGGTCTTGTGCTGCCTGGTTATAAGTATCTCGGACCCGGA |
| | | | AACGGGCTCGATCGAGGAGAGCCTGTCAACAGGGCAGACGAGGTCGCGCG |
| | | | AGAGCACGACATCTCGTACAACGAGCAGCTTGAGGCGGGAGACAACCCCT |
| | | | ACCTCAAGTACAACCACGCGGACGCCGAGTTTCAGGAGAAGCTCGCCGAC |
| | | | GACACATCCTTCGGGGGAAACCTCGGAAAGGCAGTCTTTCAGGCCAAGAA |
| | | | AAGGGTTCTCGAACCTTTTGGCCTGGTTGAAGAGGGTGCTAAGACGGCCC |
| | | | CTACCGGAAAGCGGATAG |
| 293 | 74 | VP1_aa | MSFVDHPPDWLEEVGEGLREFLGLEAGPPKPKPNQQHQDDARGLVLPGYN |
| | | | YLGPFNGLDRGEPVNAADEVAREHDISYNEQLEAGDNPYLKYNHADAEFQ |
| | | | EKLADDTSFGGNLGKAVFQAKKRVLEPFGLVEEGAKTAPTGKRIDDHFPK |
| | | | RKKARTEEDSKPSTSSDAEAGPSGSQQLQIPAQPASSLGADTMSAGGGGP |
| | | | LGDNNQGADGVGNASGDWHCDSTWMGDRVVTKSTRTWVLPSYNNHQYREI |
| | | | KSGSVDGSNANAYFGYSTPWGYFDFNRFHSHWSPRDWQRLINNYWGFRPR |
| | | | SLRVKIFNIQVKEVTVQDSTTTIANNLTSTVQVFTDDDYQLPYVVGNGTE |
| | | | GCLPAFPPQVFTLPQYGYATLNRDNTENPTERSSFFCLEYFPSKMLRTGN |
| | | | NFEFTYNFEEVPFHSSFAPSQNLFKLANPLVDQYLYRFVSTNNTGGVQFN |
| | | | KNLAGRYANTYKNWFPGPMGRTQGWNLGSGVNRASVSAFATTNRMELEGA |
| | | | SYQVPPQPNGMTNNLQGSNTYALENTMIFNSQPANPGTTATYLEGNMLIT |
| | | | SESETQPVNRVAYNVGGQMATNNQSSTTAPATGTYNLQEIVPGSVWMERD |
| | | | VYLQGPIWAKIPETGAHFHPSPAMGGFGLKHPPPMMLIKNTPVPGNITSF |
| | | | SDVPVSSFITQYSTGQVTVEMEWELKKENSKRWNPEIQYTNNYNDPQFVD |
| | | | FAPDSTGEYRTTRPIGTRYLTRPL* |
| 294 | 74 | VP1_nt | ATGTCTTTTGTTGATCACCCTCCAGATTGGTTGGAAGAAGTTGGTGAAGG |
| | | | TCTTCGCGAGTTTTTGGGCCTTGAAGCGGGCCCACCGAAACCAAAACCCA |
| | | | ATCAGCAGCATCAAGATGATGCCCGTGGTCTTGTGCTGCCTGGTTATAAC |
| | | | TATCTCGGACCCTTTAACGGGCTCGATCGAGGAGAGCCTGTCAACGCCGC |
| | | | AGACGAGGTCGCGCGAGAGCACGACATCTCGTACAACGAGCAGCTTGAGG |
| | | | CGGGAGACAACCCCTACCTCAAGTACAACCACGCGGACGCCGAGTTTCAG |
| | | | GAGAAGCTCGCCGACGACACATCCTTCGGGGGAAACCTCGGAAAGGCAGT |
| | | | CTTTCAGGCCAAGAAAAGGGTTCTCGAACCTTTTGGCCTGGTTGAAGAGG |
| | | | GTGCTAAGACGGCCCCTACCGGAAAGCGGATAGACGACCACTTTCCAAAA |
| | | | AGAAAGAAGGCTCGGACCGAAGAGGACTCCAAGCCTTCCACCTCGTCAGA |
| | | | CGCCGAAGCTGGACCCAGCGGATCCCAGCAGCTGCAAATCCCAGCCCAAC |
| | | | CAGCCTCAAGTTTGGGAGCTGATACAATGTCTGCGGGAGGTGGCGGCCCA |
| | | | TTGGGCGACAATAACCAAGGTGCCGATGGAGTGGGCAATGCCTCGGGAGA |
| | | | TTGGCATTGCGATTCCACGTGGATGGGGGACAGAGTCGTCACCAAGTCCA |
| | | | CCCGAACCTGGGTGCTGCCCAGCTACAACAACCACCAGTACCGAGAGATC |
| | | | AAAAGCGGCTCCGTCGACGGAAGCAACGCCAACGCCTACTTTGGATACAG |
| | | | CACCCCCTGGGGGTACTTTGACTTTAACCGCTTCCACAGCCACTGGAGCC |
| | | | CCCGAGACTGGCAAAGACTCATCAACAACTACTGGGGCTTCAGACCCCGG |
| | | | TCCCTCAGAGTCAAAATCTTCAACATTCAAGTCAAAGAGGTCACGGTGCA |
| | | | GGACTCCACCACCACCATCGCCAACAACCTCACCTCCACCGTCCAAGTGT |
| | | | TTACGGACGACGACTACCAGCTGCCCTACGTCGTCGGCAACGGGACCGAG |
| | | | GGATGCCTGCCGGCCTTCCCTCCGCAGGTCTTTACGCTGCCGCAGTACGG |
| | | | TTACGCGACGCTGAACCGCGACAACACAGAAAATCCCACCGAGAGGAGCA |
| | | | GCTTCTTCTGCCTAGAGTACTTTCCCAGCAAGATGCTGAGAACGGGCAAC |
| | | | AACTTTGAGTTTACCTACAACTTTGAGGAGGTGCCCTTCCACTCCAGCTT |
| | | | CGCTCCCAGTCAGAACCTGTTCAAGCTGGCCAACCCGCTGGTGGACCAGT |
| | | | ACTTGTACCGCTTCGTGAGCACAAATAACACTGGCGGAGTCCAGTTCAAC |
| | | | AAGAACCTGGCCGGGAGATACGCCAACACCTACAAAAACTGGTTCCCGGG |
| | | | GCCCATGGGCCGAACCCAGGGCTGGAACCTGGGCTCCGGGGTCAACCGCG |
| | | | CCAGTGTCAGCGCCTTCGCCACGACCAATAGGATGGAGCTCGAGGGCGCG |
| | | | AGTTACCAGGTGCCCCCGCAGCCGAACGGCATGACCAACAACCTCCAGGG |
| | | | CAGCAACACCTATGCCCTGGAGAACACTATGATCTTCAACAGCCAGCCGG |
| | | | CGAACCCGGGCACCACCGCCACGTACCTCGAGGGCAACATGCTCATCACC |
| | | | AGCGAGAGCGAGACACAGCCGGTGAACCGCGTGGCGTACAACGTCGGCGG |
| | | | GCAGATGGCCACCAACAACCAGAGCTCCACCACTGCCCCCGCGACCGGCA |
| | | | CGTACAACCTCCAGGAAATCGTGCCCGGCAGCGTGTGGATGGAGAGGGAC |
| | | | GTGTACCTCCAAGGACCCATCTGGGCCAAGATCCCAGAGACAGGGGCGCA |
| | | | CTTTCACCCCTCTCCGGCCATGGGCGGATTCGGACTCAAACACCCACCGC |
| | | | CCATGATGCTCATCAAGAACACGCCTGTGCCCGGAAATATCACCAGCTTC |
| | | | TCGGACGTGCCCGTCAGCAGCTTCATCACCCAGTACAGCACCGGGCAGGT |
| | | | CACCGTGGAGATGGAGTGGGAGCTCAAGAAGGAAAACTCCAAGAGGTGGA |
| | | | ACCCAGAGATCCAGTACACAAACAACTACAACGACCCCCAGTTTGTGGAC |
| | | | TTTGCCCCGGACAGCACCGGGGAATACAGAACCACCAGACCTATCGGAAC |
| | | | CCGATACCTTACCCGACCCCTTTAA |
| 295 | 74 | MAAP_aa | MMPVVLCCLVITISDPLIGSIEESLSTPQTRSRESTTSRTTSSLRRETTP |
| | | | TSSTTTRTPSFRRSSPTTHPSGETSERQSFRPRKGFSNLLAWLKRVLRRP |
| | | | LPESG* |
| 296 | 74 | MAAP_nt | ATGATGCCCGTGGTCTTGTGCTGCCTGGTTATAACTATCTCGGACCCTTT |
| | | | AACGGGCTCGATCGAGGAGAGCCTGTCAACGCCGCAGACGAGGTCGCGCG |
| | | | AGAGCACGACATCTCGTACAACGAGCAGCTTGAGGCGGGAGACAACCCCT |
| | | | ACCTCAAGTACAACCACGCGGACGCCGAGTTTCAGGAGAAGCTCGCCGAC |
| | | | GACACATCCTTCGGGGGAAACCTCGGAAAGGCAGTCTTTCAGGCCAAGAA |
| | | | AAGGGTTCTCGAACCTTTTGGCCTGGTTGAAGAGGGTGCTAAGACGGCCC |
| | | | CTACCGGAAAGCGGATAG |
| 297 | 75 | VP1_aa | MSFVDHPPDWLEEVGEGLREFLGLEAGPPKPKPNQQKQDDARGLVLPGYK |
| | | | YLGPFNGLDRGEPVNEADEVAREHDISYNEQLEAGDNPYLKYNHADAEFQ |
| | | | EKLADDTSFGGNLGKAVFQAKKRVLEPFGLVEEGAKTAPTGKRIDDHFPK |
| | | | RKKARTEEDSKPSTSSDAEAGPSGSQQLQIPAQPASSLGADTMSAGGGGP |
| | | | LGDNNQGADGVGNASGDWHCDSTWMGDRVVTKSTRTWVLPSYNNHQYREI |
| | | | KSGSVDGSNANAYFGYSTPWGYFDFNRFHSHWSPRDWQRLINNYWGFRPR |
| | | | SLRVKIFNIQVKEVTVQDSTTTIANNLTSTVQVFTDDDYQLPYVVGNGTE |
| | | | GCLPAFPPQVFTLPQYGYATLNRDNTENPTERSSFFCLEYFPSKMLRTGN |
| | | | NFEFTYNFEEVPFHSSFAPSQNLFKLANPLVDQYLYRFVSTNNTGGVQFN |
| | | | KNLAGRYANTYKNWFPGPMGRTQGWNLGSGVNRASVSAFATTNRMELEGA |
| | | | SYQVPPQPNGMTNNLQGSNTYALENTMIFNSQPANPGTTATYLEGNMLIT |
| | | | SESETQPVNRVAYNVGGQMATNNQSSTTAPATGTYNLQEIVPGSVWMERD |
| | | | VYLQGPIWAKIPETGAHFHPSPAMGGFGLKHPPPMMLIKNTPVPGNITSF |
| | | | SDVPVSSFITQYSTGQVTVEMEWELKKENSKRWNPEIQYTNNYNDPQFVD |
| | | | FAPDSTGEYRTTRPIGTRYLTRPL* |
| 298 | 75 | VP1_nt | ATGTCTTTTGTTGATCACCCTCCAGATTGGTTGGAAGAAGTTGGTGAAGG |
| | | | TCTTCGCGAGTTTTTGGGCCTTGAAGCGGGCCCACCGAAACCAAAACCCA |
| | | | ATCAGCAGAAGCAAGATGATGCCCGTGGTCTTGTGCTGCCTGGTTATAAG |
| | | | TATCTCGGACCCTTCAACGGGCTCGATCGAGGAGAGCCTGTCAACGAGGC |
| | | | AGACGAGGTCGCGCGAGAGCACGACATCTCGTACAACGAGCAGCTTGAGG |
| | | | CGGGAGACAACCCCTACCTCAAGTACAACCACGCGGACGCCGAGTTTCAG |
| | | | GAGAAGCTCGCCGACGACACATCCTTCGGGGGAAACCTCGGAAAGGCAGT |
| | | | CTTTCAGGCCAAGAAAAGGGTTCTCGAACCTTTTGGCCTGGTTGAAGAGG |
| | | | GTGCTAAGACGGCCCCTACCGGAAAGCGGATAGACGACCACTTTCCAAAA |
| | | | AGAAAGAAGGCTCGGACCGAAGAGGACTCCAAGCCTTCCACCTCGTCAGA |
| | | | CGCCGAAGCTGGACCCAGCGGATCCCAGCAGCTGCAAATCCCAGCCCAAC |
| | | | CAGCCTCAAGTTTGGGAGCTGATACAATGTCTGCGGGAGGTGGCGGCCCA |
| | | | TTGGGCGACAATAACCAAGGTGCCGATGGAGTGGGCAATGCCTCGGGAGA |
| | | | TTGGCATTGCGATTCCACGTGGATGGGGGACAGAGTCGTCACCAAGTCCA |
| | | | CCCGAACCTGGGTGCTGCCCAGCTACAACAACCACCAGTACCGAGAGATC |
| | | | AAAAGCGGCTCCGTCGACGGAAGCAACGCCAACGCCTACTTTGGATACAG |
| | | | CACCCCCTGGGGGTACTTTGACTTTAACCGCTTCCACAGCCACTGGAGCC |
| | | | CCCGAGACTGGCAAAGACTCATCAACAACTACTGGGGCTTCAGACCCCGG |
| | | | TCCCTCAGAGTCAAAATCTTCAACATTCAAGTCAAAGAGGTCACGGTGCA |
| | | | GGACTCCACCACCACCATCGCCAACAACCTCACCTCCACCGTCCAAGTGT |
| | | | TTACGGACGACGACTACCAGCTGCCCTACGTCGTCGGCAACGGGACCGAG |
| | | | GGATGCCTGCCGGCCTTCCCTCCGCAGGTCTTTACGCTGCCGCAGTACGG |
| | | | TTACGCGACGCTGAACCGCGACAACACAGAAAATCCCACCGAGAGGAGCA |
| | | | GCTTCTTCTGCCTAGAGTACTTTCCCAGCAAGATGCTGAGAACGGGCAAC |
| | | | AACTTTGAGTTTACCTACAACTTTGAGGAGGTGCCCTTCCACTCCAGCTT |
| | | | CGCTCCCAGTCAGAACCTGTTCAAGCTGGCCAACCCGCTGGTGGACCAGT |
| | | | ACTTGTACCGCTTCGTGAGCACAAATAACACTGGCGGAGTCCAGTTCAAC |
| | | | AAGAACCTGGCCGGGAGATACGCCAACACCTACAAAAACTGGTTCCCGGG |
| | | | GCCCATGGGCCGAACCCAGGGCTGGAACCTGGGCTCCGGGGTCAACCGCG |
| | | | CCAGTGTCAGCGCCTTCGCCACGACCAATAGGATGGAGCTCGAGGGCGCG |
| | | | AGTTACCAGGTGCCCCCGCAGCCGAACGGCATGACCAACAACCTCCAGGG |
| | | | CAGCAACACCTATGCCCTGGAGAACACTATGATCTTCAACAGCCAGCCGG |
| | | | CGAACCCGGGCACCACCGCCACGTACCTCGAGGGCAACATGCTCATCACC |
| | | | AGCGAGAGCGAGACACAGCCGGTGAACCGCGTGGCGTACAACGTCGGCGG |
| | | | GCAGATGGCCACCAACAACCAGAGCTCCACCACTGCCCCCGCGACCGGCA |
| | | | CGTACAACCTCCAGGAAATCGTGCCCGGCAGCGTGTGGATGGAGAGGGAC |
| | | | GTGTACCTCCAAGGACCCATCTGGGCCAAGATCCCAGAGACAGGGGCGCA |
| | | | CTTTCACCCCTCTCCGGCCATGGGCGGATTCGGACTCAAACACCCACCGC |
| | | | CCATGATGCTCATCAAGAACACGCCTGTGCCCGGAAATATCACCAGCTTC |
| | | | TCGGACGTGCCCGTCAGCAGCTTCATCACCCAGTACAGCACCGGGCAGGT |
| | | | CACCGTGGAGATGGAGTGGGAGCTCAAGAAGGAAAACTCCAAGAGGTGGA |
| | | | ACCCAGAGATCCAGTACACAAACAACTACAACGACCCCCAGTTTGTGGAC |
| | | | TTTGCCCCGGACAGCACCGGGGAATACAGAACCACCAGACCTATCGGAAC |
| | | | CCGATACCTTACCCGACCCCTTTAA |
| 299 | 75 | MAAP_aa | MMPVVLCCLVISISDPSTGSIEESLSTRQTRSRESTTSRTTSSLRRETTP |
| | | | TSSTTTRTPSFRRSSPTTHPSGETSERQSFRPRKGFSNLLAWLKRVLRRP |
| | | | LPESG* |
| 300 | 75 | MAAP_nt | ATGATGCCCGTGGTCTTGTGCTGCCTGGTTATAAGTATCTCGGACCCTTC |
| | | | AACGGGCTCGATCGAGGAGAGCCTGTCAACGAGGCAGACGAGGTCGCGCG |
| | | | AGAGCACGACATCTCGTACAACGAGCAGCTTGAGGCGGGAGACAACCCCT |
| | | | ACCTCAAGTACAACCACGCGGACGCCGAGTTTCAGGAGAAGCTCGCCGAC |
| | | | GACACATCCTTCGGGGGAAACCTCGGAAAGGCAGTCTTTCAGGCCAAGAA |
| | | | AAGGGTTCTCGAACCTTTTGGCCTGGTTGAAGAGGGTGCTAAGACGGCCC |
| | | | CTACCGGAAAGCGGATAG |
| 301 | 76 | VP1_aa | MSFVDHPPDWLEEVGEGLREFLGLEAGPPKPKPNQQIQHADQARGLVLPG |
| | | | YNYLGPFNGLDRGEPVNAADEVAREHDISYNEQLEAGDNPYLKYNHADAE |
| | | | FQEKLADDTSFGGNLGKAVFQAKKRVLEPFGLVEEGAKTAPTGKRIDDHF |
| | | | PKRKKARTEEDSKPSTSSDAEAGPSGSQQLQIPAQPASSLGADTMSAGGG |
| | | | GPLGDNNQGADGVGNASGDWHCDSTWMGDRVVTKSTRTWVLPSYNNHQYR |
| | | | EIKSGSVDGSNANAYFGYSTPWGYFDFNRFHSHWSPRDWQRLINNYWGFR |
| | | | PRSLRVKIFNIQVKEVTVQDSTTTIANNLTSTVQVFTDDDYQLPYVVGNG |
| | | | TEGCLPAFPPQVFTLPQYGYATLNRDNTENPTERSSFFCLEYFPSKMLRT |
| | | | GNNFEFTYNFEEVPFHSSFAPSQNLFKLANPLVDQYLYRFVSTNNTGGVQ |
| | | | FNKNLAGRYANTYKNWFPGPMGRTQGWNLGSGVNRASVSAFATTNRMELE |
| | | | GASYQVPPQPNGMTNNLQGSNTYALENTMIFNSQPANPGTTATYLEGNML |
| | | | ITSESETQPVNRVAYNVGGQMATNNQSSTTAPATGTYNLQEIVPGSVWME |
| | | | RDVYLQGPIWAKIPETGAHFHPSPAMGGFGLKHPPPMMLIKNTPVPGNIT |
| | | | SFSDVPVSSFITQYSTGQVTVEMEWELKKENSKRWNPEIQYTNNYNDPQF |
| | | | VDFAPDSTGEYRTTRPIGTRYLTRPL* |
| 302 | 76 | VP1_nt | ATGTCTTTTGTTGATCACCCTCCAGATTGGTTGGAAGAAGTTGGTGAAGG |
| | | | TCTTCGCGAGTTTTTGGGCCTTGAAGCGGGCCCACCGAAACCAAAACCCA |
| | | | ATCAGCAGATCCAACATGCGGACCAAGCCCGTGGTCTTGTGCTGCCTGGT |
| | | | TATAACTATCTCGGACCCTTCAACGGGCTCGATCGAGGAGAGCCTGTCAA |
| | | | CGCGGCAGACGAGGTCGCGCGAGAGCACGACATCTCGTACAACGAGCAGC |
| | | | TTGAGGCGGGAGACAACCCCTACCTCAAGTACAACCACGCGGACGCCGAG |
| | | | TTTCAGGAGAAGCTCGCCGACGACACATCCTTCGGGGGAAACCTCGGAAA |
| | | | GGCAGTCTTTCAGGCCAAGAAAAGGGTTCTCGAACCTTTTGGCCTGGTTG |
| | | | AAGAGGGTGCTAAGACGGCCCCTACCGGAAAGCGGATAGACGACCACTTT |
| | | | CCAAAAAGAAAGAAGGCTCGGACCGAAGAGGACTCCAAGCCTTCCACCTC |
| | | | GTCAGACGCCGAAGCTGGACCCAGCGGATCCCAGCAGCTGCAAATCCCAG |
| | | | CCCAACCAGCCTCAAGTTTGGGAGCTGATACAATGTCTGCGGGAGGTGGC |
| | | | GGCCCATTGGGCGACAATAACCAAGGTGCCGATGGAGTGGGCAATGCCTC |
| | | | GGGAGATTGGCATTGCGATTCCACGTGGATGGGGGACAGAGTCGTCACCA |
| | | | AGTCCACCCGAACCTGGGTGCTGCCCAGCTACAACAACCACCAGTACCGA |
| | | | GAGATCAAAAGCGGCTCCGTCGACGGAAGCAACGCCAACGCCTACTTTGG |
| | | | ATACAGCACCCCCTGGGGGTACTTTGACTTTAACCGCTTCCACAGCCACT |
| | | | GGAGCCCCCGAGACTGGCAAAGACTCATCAACAACTACTGGGGCTTCAGA |
| | | | CCCCGGTCCCTCAGAGTCAAAATCTTCAACATTCAAGTCAAAGAGGTCAC |
| | | | GGTGCAGGACTCCACCACCACCATCGCCAACAACCTCACCTCCACCGTCC |
| | | | AAGTGTTTACGGACGACGACTACCAGCTGCCCTACGTCGTCGGCAACGGG |
| | | | ACCGAGGGATGCCTGCCGGCCTTCCCTCCGCAGGTCTTTACGCTGCCGCA |
| | | | GTACGGTTACGCGACGCTGAACCGCGACAACACAGAAAATCCCACCGAGA |
| | | | GGAGCAGCTTCTTCTGCCTAGAGTACTTTCCCAGCAAGATGCTGAGAACG |
| | | | GGCAACAACTTTGAGTTTACCTACAACTTTGAGGAGGTGCCCTTCCACTC |
| | | | CAGCTTCGCTCCCAGTCAGAACCTGTTCAAGCTGGCCAACCCGCTGGTGG |
| | | | ACCAGTACTTGTACCGCTTCGTGAGCACAAATAACACTGGCGGAGTCCAG |
| | | | TTCAACAAGAACCTGGCCGGGAGATACGCCAACACCTACAAAAACTGGTT |
| | | | CCCGGGGCCCATGGGCCGAACCCAGGGCTGGAACCTGGGCTCCGGGGTCA |
| | | | ACCGCGCCAGTGTCAGCGCCTTCGCCACGACCAATAGGATGGAGCTCGAG |
| | | | GGCGCGAGTTACCAGGTGCCCCCGCAGCCGAACGGCATGACCAACAACCT |
| | | | CCAGGGCAGCAACACCTATGCCCTGGAGAACACTATGATCTTCAACAGCC |
| | | | AGCCGGCGAACCCGGGCACCACCGCCACGTACCTCGAGGGCAACATGCTC |
| | | | ATCACCAGCGAGAGCGAGACACAGCCGGTGAACCGCGTGGCGTACAACGT |
| | | | CGGCGGGCAGATGGCCACCAACAACCAGAGCTCCACCACTGCCCCCGCGA |
| | | | CCGGCACGTACAACCTCCAGGAAATCGTGCCCGGCAGCGTGTGGATGGAG |
| | | | AGGGACGTGTACCTCCAAGGACCCATCTGGGCCAAGATCCCAGAGACAGG |
| | | | GGCGCACTTTCACCCCTCTCCGGCCATGGGCGGATTCGGACTCAAACACC |
| | | | CACCGCCCATGATGCTCATCAAGAACACGCCTGTGCCCGGAAATATCACC |
| | | | AGCTTCTCGGACGTGCCCGTCAGCAGCTTCATCACCCAGTACAGCACCGG |
| | | | GCAGGTCACCGTGGAGATGGAGTGGGAGCTCAAGAAGGAAAACTCCAAGA |
| | | | GGTGGAACCCAGAGATCCAGTACACAAACAACTACAACGACCCCCAGTTT |
| | | | GTGGACTTTGCCCCGGACAGCACCGGGGAATACAGAACCACCAGACCTAT |
| | | | CGGAACCCGATACCTTACCCGACCCCTTTAA |
| 303 | 76 | MAAP_aa | MRTKPVVLCCLVITISDPSTGSIEESLSTRQTRSRESTTSRTTSSLRRET |
| | | | TPTSSTTTRTPSFRRSSPTTHPSGETSERQSFRPRKGFSNLLAWLKRVLR |
| | | | RPLPESG* |
| 304 | 76 | MAAP_nt | ATGCGGACCAAGCCCGTGGTCTTGTGCTGCCTGGTTATAACTATCTCGGA |
| | | | CCCTTCAACGGGCTCGATCGAGGAGAGCCTGTCAACGCGGCAGACGAGGT |
| | | | CGCGCGAGAGCACGACATCTCGTACAACGAGCAGCTTGAGGCGGGAGACA |
| | | | ACCCCTACCTCAAGTACAACCACGCGGACGCCGAGTTTCAGGAGAAGCTC |
| | | | GCCGACGACACATCCTTCGGGGGAAACCTCGGAAAGGCAGTCTTTCAGGC |
| | | | CAAGAAAAGGGTTCTCGAACCTTTTGGCCTGGTTGAAGAGGGTGCTAAGA |
| | | | CGGCCCCTACCGGAAAGCGGATAG |
| 305 | 77 | VP1_aa | MSFVDHPPDWLEEVGEGLREFLGLEAGPPKPKPNERHKDQARGLVLPGYK |
| | | | YLGPGNGLDRGEPVNRADEVAREHDISYNEQLEAGDNPYLKYNHADAEFQ |
| | | | EKLADDTSFGGNLGKAVFQAKKRVLEPFGLVEEGAKTAPTGKRIDDHFPK |
| | | | RKKARTEEDSKPSTSSDAEAGPSGSQQLQIPAQPASSLGADTMSAGGGGP |
| | | | LGDNNQGADGVGNASGDWHCDSTWMGDRVVTKSTRTWVLPSYNNHQYREI |
| | | | KSGSVDGSNANAYFGYSTPWGYFDFNRFHSHWSPRDWQRLINNYWGFRPR |
| | | | SLRVKIFNIQVKEVTVQDSTTTIANNLTSTVQVFTDDDYQLPYVVGNGTE |
| | | | GCLPAFPPQVFTLPQYGYATLNRDNTENPTERSSFFCLEYFPSKMLRTGN |
| | | | NFEFTYNFEEVPFHSSFAPSQNLFKLANPLVDQYLYRFVSTNNTGGVQFN |
| | | | KNLAGRYANTYKNWFPGPMGRTQGWNLGSGVNRASVSAFATTNRMELEGA |
| | | | SYQVPPQPNGMTNNLQGSNTYALENTMIFNSQPANPGTTATYLEGNMLIT |
| | | | SESETQPVNRVAYNVGGQMATNNQSSTTAPATGTYNLQEIVPGSVWMERD |
| | | | VYLQGPIWAKIPETGAHFHPSPAMGGFGLKHPPPMMLIKNTPVPGNITSF |
| | | | SDVPVSSFITQYSTGQVTVEMEWELKKENSKRWNPEIQYTNNYNDPQFVD |
| | | | FAPDSTGEYRTTRPIGTRYLTRPL* |
| 306 | 77 | VP1_nt | ATGTCTTTTGTTGATCACCCTCCAGATTGGTTGGAAGAAGTTGGTGAAGG |
| | | | TCTTCGCGAGTTTTTGGGCCTTGAAGCGGGCCCACCGAAACCAAAACCCA |
| | | | ATGAGCGCCATAAGGATCAAGCCCGTGGTCTTGTGCTGCCTGGTTATAAG |
| | | | TATCTCGGACCCGGAAACGGGCTCGATCGAGGAGAGCCTGTCAACAGGGC |
| | | | AGACGAGGTCGCGCGAGAGCACGACATCTCGTACAACGAGCAGCTTGAGG |
| | | | CGGGAGACAACCCCTACCTCAAGTACAACCACGCGGACGCCGAGTTTCAG |
| | | | GAGAAGCTCGCCGACGACACATCCTTCGGGGGAAACCTCGGAAAGGCAGT |
| | | | CTTTCAGGCCAAGAAAAGGGTTCTCGAACCTTTTGGCCTGGTTGAAGAGG |
| | | | GTGCTAAGACGGCCCCTACCGGAAAGCGGATAGACGACCACTTTCCAAAA |
| | | | AGAAAGAAGGCTCGGACCGAAGAGGACTCCAAGCCTTCCACCTCGTCAGA |
| | | | CGCCGAAGCTGGACCCAGCGGATCCCAGCAGCTGCAAATCCCAGCCCAAC |
| | | | CAGCCTCAAGTTTGGGAGCTGATACAATGTCTGCGGGAGGTGGCGGCCCA |
| | | | TTGGGCGACAATAACCAAGGTGCCGATGGAGTGGGCAATGCCTCGGGAGA |
| | | | TTGGCATTGCGATTCCACGTGGATGGGGGACAGAGTCGTCACCAAGTCCA |
| | | | CCCGAACCTGGGTGCTGCCCAGCTACAACAACCACCAGTACCGAGAGATC |
| | | | AAAAGCGGCTCCGTCGACGGAAGCAACGCCAACGCCTACTTTGGATACAG |
| | | | CACCCCCTGGGGGTACTTTGACTTTAACCGCTTCCACAGCCACTGGAGCC |
| | | | CCCGAGACTGGCAAAGACTCATCAACAACTACTGGGGCTTCAGACCCCGG |
| | | | TCCCTCAGAGTCAAAATCTTCAACATTCAAGTCAAAGAGGTCACGGTGCA |
| | | | GGACTCCACCACCACCATCGCCAACAACCTCACCTCCACCGTCCAAGTGT |
| | | | TTACGGACGACGACTACCAGCTGCCCTACGTCGTCGGCAACGGGACCGAG |
| | | | GGATGCCTGCCGGCCTTCCCTCCGCAGGTCTTTACGCTGCCGCAGTACGG |
| | | | TTACGCGACGCTGAACCGCGACAACACAGAAAATCCCACCGAGAGGAGCA |
| | | | GCTTCTTCTGCCTAGAGTACTTTCCCAGCAAGATGCTGAGAACGGGCAAC |
| | | | AACTTTGAGTTTACCTACAACTTTGAGGAGGTGCCCTTCCACTCCAGCTT |
| | | | CGCTCCCAGTCAGAACCTGTTCAAGCTGGCCAACCCGCTGGTGGACCAGT |
| | | | ACTTGTACCGCTTCGTGAGCACAAATAACACTGGCGGAGTCCAGTTCAAC |
| | | | AAGAACCTGGCCGGGAGATACGCCAACACCTACAAAAACTGGTTCCCGGG |
| | | | GCCCATGGGCCGAACCCAGGGCTGGAACCTGGGCTCCGGGGTCAACCGCG |
| | | | CCAGTGTCAGCGCCTTCGCCACGACCAATAGGATGGAGCTCGAGGGCGCG |
| | | | AGTTACCAGGTGCCCCCGCAGCCGAACGGCATGACCAACAACCTCCAGGG |
| | | | CAGCAACACCTATGCCCTGGAGAACACTATGATCTTCAACAGCCAGCCGG |
| | | | CGAACCCGGGCACCACCGCCACGTACCTCGAGGGCAACATGCTCATCACC |
| | | | AGCGAGAGCGAGACACAGCCGGTGAACCGCGTGGCGTACAACGTCGGCGG |
| | | | GCAGATGGCCACCAACAACCAGAGCTCCACCACTGCCCCCGCGACCGGCA |
| | | | CGTACAACCTCCAGGAAATCGTGCCCGGCAGCGTGTGGATGGAGAGGGAC |
| | | | GTGTACCTCCAAGGACCCATCTGGGCCAAGATCCCAGAGACAGGGGCGCA |
| | | | CTTTCACCCCTCTCCGGCCATGGGCGGATTCGGACTCAAACACCCACCGC |
| | | | CCATGATGCTCATCAAGAACACGCCTGTGCCCGGAAATATCACCAGCTTC |
| | | | TCGGACGTGCCCGTCAGCAGCTTCATCACCCAGTACAGCACCGGGCAGGT |
| | | | CACCGTGGAGATGGAGTGGGAGCTCAAGAAGGAAAACTCCAAGAGGTGGA |
| | | | ACCCAGAGATCCAGTACACAAACAACTACAACGACCCCCAGTTTGTGGAC |
| | | | TTTGCCCCGGACAGCACCGGGGAATACAGAACCACCAGACCTATCGGAAC |
| | | | CCGATACCTTACCCGACCCCTTTAA |
| 307 | 77 | MAAP_aa | MSAIRIKPVVLCCLVISISDPETGSIEESLSTGQTRSRESTTSRTTSSLR |
| | | | RETTPTSSTTTRTPSFRRSSPTTHPSGETSERQSFRPRKGFSNLLAWLKR |
| | | | VLRRPLPESG* |
| 308 | 77 | MAAP_nt | ATGAGCGCCATAAGGATCAAGCCCGTGGTCTTGTGCTGCCTGGTTATAAG |
| | | | TATCTCGGACCCGGAAACGGGCTCGATCGAGGAGAGCCTGTCAACAGGGC |
| | | | AGACGAGGTCGCGCGAGAGCACGACATCTCGTACAACGAGCAGCTTGAGG |
| | | | CGGGAGACAACCCCTACCTCAAGTACAACCACGCGGACGCCGAGTTTCAG |
| | | | GAGAAGCTCGCCGACGACACATCCTTCGGGGGAAACCTCGGAAAGGCAGT |
| | | | CTTTCAGGCCAAGAAAAGGGTTCTCGAACCTTTTGGCCTGGTTGAAGAGG |
| | | | GTGCTAAGACGGCCCCTACCGGAAAGCGGATAG |
| 309 | 78 | VP1_aa | MSFVDHPPDWLEEVGEGLREFLGLEAGPPKPKPNQQHQDQARGLVLPGYN |
| | | | YLGPGNGLDRGEPVNRADAVAREHDISYDEQLKAGDNPYLRYNHADAEFQ |
| | | | EKLADDTSFGGNLGKAVFQAKKRVLEPFGLVEEGAKTAPTGKRIDDHFPK |
| | | | RKKARTEEDSKPSTSSDAEAGPSGSQQLQIPAQPASSLGADTMSAGGGGP |
| | | | LGDNNQGADGVGNASGDWHCDSTWMGDRVVTKSTRTWVLPSYNNHQYREI |
| | | | KSGSVDGSNANAYFGYSTPWGYFDFNRFHSHWSPRDWQRLINNYWGFRPR |
| | | | SLRVKIFNIQVKEVTVQDSTTTIANNLTSTVQVFTDDDYQLPYVVGNGTE |
| | | | GCLPAFPPQVFTLPQYGYATLNRDNTENPTERSSFFCLEYFPSKMLRTGN |
| | | | NFEFTYNFEEVPFHSSFAPSQNLFKLANPLVDQYLYRFVSTNNTGGVQFN |
| | | | KNLAGRYANTYKNWFPGPMGRTQGWNLGSGVNRASVSAFATTNRMELEGA |
| | | | SYQVPPQPNGMTNNLQGSNTYALENTMIFNSQPANPGTTATYLEGNMLIT |
| | | | SESETQPVNRVAYNVGGQMATNNQSSTTAPATGTYNLQEIVPGSVWMERD |
| | | | VYLQGPIWAKIPETGAHFHPSPAMGGFGLKHPPPMMLIKNTPVPGNITSF |
| | | | SDVPVSSFITQYSTGQVTVEMEWELKKENSKRWNPEIQYTNNYNDPQFVD |
| | | | FAPDSTGEYRTTRPIGTRYLTRPL* |
| 310 | 78 | VP1_nt | ATGTCTTTTGTTGATCACCCTCCAGATTGGTTGGAAGAAGTTGGTGAAGG |
| | | | TCTTCGCGAGTTTTTGGGCCTTGAAGCGGGCCCACCGAAACCAAAACCCA |
| | | | ATCAGCAGCATCAAGATCAAGCCCGTGGTCTTGTGCTGCCTGGTTATAAC |
| | | | TATCTCGGACCCGGAAACGGGCTCGATCGAGGAGAGCCTGTCAACAGGGC |
| | | | AGACGCGGTCGCGCGAGAGCACGACATCTCGTACGATGAGCAGCTTAAGG |
| | | | CGGGAGACAACCCCTACCTCAGATACAACCACGCGGACGCCGAGTTTCAG |
| | | | GAGAAGCTCGCCGACGACACATCCTTCGGGGGAAACCTCGGAAAGGCAGT |
| | | | CTTTCAGGCCAAGAAAAGGGTTCTCGAACCTTTTGGCCTGGTTGAAGAGG |
| | | | GTGCTAAGACGGCCCCTACCGGAAAGCGGATAGACGACCACTTTCCAAAA |
| | | | AGAAAGAAGGCTCGGACCGAAGAGGACTCCAAGCCTTCCACCTCGTCAGA |
| | | | CGCCGAAGCTGGACCCAGCGGATCCCAGCAGCTGCAAATCCCAGCCCAAC |
| | | | CAGCCTCAAGTTTGGGAGCTGATACAATGTCTGCGGGAGGTGGCGGCCCA |
| | | | TTGGGCGACAATAACCAAGGTGCCGATGGAGTGGGCAATGCCTCGGGAGA |
| | | | TTGGCATTGCGATTCCACGTGGATGGGGGACAGAGTCGTCACCAAGTCCA |
| | | | CCCGAACCTGGGTGCTGCCCAGCTACAACAACCACCAGTACCGAGAGATC |
| | | | AAAAGCGGCTCCGTCGACGGAAGCAACGCCAACGCCTACTTTGGATACAG |
| | | | CACCCCCTGGGGGTACTTTGACTTTAACCGCTTCCACAGCCACTGGAGCC |
| | | | CCCGAGACTGGCAAAGACTCATCAACAACTACTGGGGCTTCAGACCCCGG |
| | | | TCCCTCAGAGTCAAAATCTTCAACATTCAAGTCAAAGAGGTCACGGTGCA |
| | | | GGACTCCACCACCACCATCGCCAACAACCTCACCTCCACCGTCCAAGTGT |
| | | | TTACGGACGACGACTACCAGCTGCCCTACGTCGTCGGCAACGGGACCGAG |
| | | | GGATGCCTGCCGGCCTTCCCTCCGCAGGTCTTTACGCTGCCGCAGTACGG |
| | | | TTACGCGACGCTGAACCGCGACAACACAGAAAATCCCACCGAGAGGAGCA |
| | | | GCTTCTTCTGCCTAGAGTACTTTCCCAGCAAGATGCTGAGAACGGGCAAC |
| | | | AACTTTGAGTTTACCTACAACTTTGAGGAGGTGCCCTTCCACTCCAGCTT |
| | | | CGCTCCCAGTCAGAACCTGTTCAAGCTGGCCAACCCGCTGGTGGACCAGT |
| | | | ACTTGTACCGCTTCGTGAGCACAAATAACACTGGCGGAGTCCAGTTCAAC |
| | | | AAGAACCTGGCCGGGAGATACGCCAACACCTACAAAAACTGGTTCCCGGG |
| | | | GCCCATGGGCCGAACCCAGGGCTGGAACCTGGGCTCCGGGGTCAACCGCG |
| | | | CCAGTGTCAGCGCCTTCGCCACGACCAATAGGATGGAGCTCGAGGGCGCG |
| | | | AGTTACCAGGTGCCCCCGCAGCCGAACGGCATGACCAACAACCTCCAGGG |
| | | | CAGCAACACCTATGCCCTGGAGAACACTATGATCTTCAACAGCCAGCCGG |
| | | | CGAACCCGGGCACCACCGCCACGTACCTCGAGGGCAACATGCTCATCACC |
| | | | AGCGAGAGCGAGACACAGCCGGTGAACCGCGTGGCGTACAACGTCGGCGG |
| | | | GCAGATGGCCACCAACAACCAGAGCTCCACCACTGCCCCCGCGACCGGCA |
| | | | CGTACAACCTCCAGGAAATCGTGCCCGGCAGCGTGTGGATGGAGAGGGAC |
| | | | GTGTACCTCCAAGGACCCATCTGGGCCAAGATCCCAGAGACAGGGGCGCA |
| | | | CTTTCACCCCTCTCCGGCCATGGGCGGATTCGGACTCAAACACCCACCGC |
| | | | CCATGATGCTCATCAAGAACACGCCTGTGCCCGGAAATATCACCAGCTTC |
| | | | TCGGACGTGCCCGTCAGCAGCTTCATCACCCAGTACAGCACCGGGCAGGT |
| | | | CACCGTGGAGATGGAGTGGGAGCTCAAGAAGGAAAACTCCAAGAGGTGGA |
| | | | ACCCAGAGATCCAGTACACAAACAACTACAACGACCCCCAGTTTGTGGAC |
| | | | TTTGCCCCGGACAGCACCGGGGAATACAGAACCACCAGACCTATCGGAAC |
| | | | CCGATACCTTACCCGACCCCTTTAA |
| 311 | 78 | MAAP_aa | MSSLRRETTPTSDTTTRTPSFRRSSPTTHPSGETSERQSFRPRKGFSNLL |
| | | | AWLKRVLRRPLPESG* |
| 312 | 78 | MAAP_nt | ATGAGCAGCTTAAGGCGGGAGACAACCCCTACCTCAGATACAACCACGCG |
| | | | GACGCCGAGTTTCAGGAGAAGCTCGCCGACGACACATCCTTCGGGGGAAA |
| | | | CCTCGGAAAGGCAGTCTTTCAGGCCAAGAAAAGGGTTCTCGAACCTTTTG |
| | | | GCCTGGTTGAAGAGGGTGCTAAGACGGCCCCTACCGGAAAGCGGATAG |
| 313 | 79 | VP1_aa | MSFVDHPPDWLEEVGEGLREFLGLEAGPPKPKPNAQHQDQARGLVLPGYN |
| | | | YLGPGNGLDRGEPVNRADEVAREHDISYNEQLEAGDNPYLKYNHADAEFQ |
| | | | EKLADDTSFGGNLGKAVFQAKKRVLEPFGLVEEGAKTAPTGKRIDDHFPK |
| | | | RKKARTEEDSKPSTSSDAEAGPSGSQQLQIPAQPASSLGADTMSAGGGGP |
| | | | LGDNNQGADGVGNASGDWHCDSTWMGDRVVTKSTRTWVLPSYNNHQYREI |
| | | | KSGSVDGSNANAYFGYSTPWGYFDFNRFHSHWSPRDWQRLINNYWGFRPR |
| | | | SLRVKIFNIQVKEVTVQDSTTTIANNLTSTVQVFTDDDYQLPYVVGNGTE |
| | | | GCLPAFPPQVFTLPQYGYATLNRDNTENPTERSSFFCLEYFPSKMLRTGN |
| | | | NFEFTYNFEEVPFHSSFAPSQNLFKLANPLVDQYLYRFVSTNNTGGVQFN |
| | | | KNLAGRYANTYKNWFPGPMGRTQGWNLGSGVNRASVSAFATTNRMELEGA |
| | | | SYQVPPQPNGMTNNLQGSNTYALENTMIFNSQPANPGTTATYLEGNMLIT |
| | | | SESETQPVNRVAYNVGGQMATNNQSSTTAPATGTYNLQEIVPGSVWMERD |
| | | | VYLQGPIWAKIPETGAHFHPSPAMGGFGLKHPPPMMLIKNTPVPGNITSF |
| | | | SDVPVSSFITQYSTGQVTVEMEWELKKENSKRWNPEIQYTNNYNDPQFVD |
| | | | FAPDSTGEYRTTRPIGTRYLTRPL* |
| 314 | 79 | VP1_nt | ATGTCTTTTGTTGATCACCCTCCAGATTGGTTGGAAGAAGTTGGTGAAGG |
| | | | TCTTCGCGAGTTTTTGGGCCTTGAAGCGGGCCCACCGAAACCAAAACCCA |
| | | | ATGCACAGCATCAAGATCAAGCCCGTGGTCTTGTGCTGCCTGGTTATAAC |
| | | | TATCTCGGACCCGGAAACGGGCTCGATCGAGGAGAGCCTGTCAACAGGGC |
| | | | AGACGAGGTCGCGCGAGAGCACGACATCTCGTACAACGAGCAGCTTGAGG |
| | | | CGGGAGACAACCCCTACCTCAAGTACAACCACGCGGACGCCGAGTTTCAG |
| | | | GAGAAGCTCGCCGACGACACATCCTTCGGGGGAAACCTCGGAAAGGCAGT |
| | | | CTTTCAGGCCAAGAAAAGGGTTCTCGAACCTTTTGGCCTGGTTGAAGAGG |
| | | | GTGCTAAGACGGCCCCTACCGGAAAGCGGATAGACGACCACTTTCCAAAA |
| | | | AGAAAGAAGGCTCGGACCGAAGAGGACTCCAAGCCTTCCACCTCGTCAGA |
| | | | CGCCGAAGCTGGACCCAGCGGATCCCAGCAGCTGCAAATCCCAGCCCAAC |
| | | | CAGCCTCAAGTTTGGGAGCTGATACAATGTCTGCGGGAGGTGGCGGCCCA |
| | | | TTGGGCGACAATAACCAAGGTGCCGATGGAGTGGGCAATGCCTCGGGAGA |
| | | | TTGGCATTGCGATTCCACGTGGATGGGGGACAGAGTCGTCACCAAGTCCA |
| | | | CCCGAACCTGGGTGCTGCCCAGCTACAACAACCACCAGTACCGAGAGATC |
| | | | AAAAGCGGCTCCGTCGACGGAAGCAACGCCAACGCCTACTTTGGATACAG |
| | | | CACCCCCTGGGGGTACTTTGACTTTAACCGCTTCCACAGCCACTGGAGCC |
| | | | CCCGAGACTGGCAAAGACTCATCAACAACTACTGGGGCTTCAGACCCCGG |
| | | | TCCCTCAGAGTCAAAATCTTCAACATTCAAGTCAAAGAGGTCACGGTGCA |
| | | | GGACTCCACCACCACCATCGCCAACAACCTCACCTCCACCGTCCAAGTGT |
| | | | TTACGGACGACGACTACCAGCTGCCCTACGTCGTCGGCAACGGGACCGAG |
| | | | GGATGCCTGCCGGCCTTCCCTCCGCAGGTCTTTACGCTGCCGCAGTACGG |
| | | | TTACGCGACGCTGAACCGCGACAACACAGAAAATCCCACCGAGAGGAGCA |
| | | | GCTTCTTCTGCCTAGAGTACTTTCCCAGCAAGATGCTGAGAACGGGCAAC |
| | | | AACTTTGAGTTTACCTACAACTTTGAGGAGGTGCCCTTCCACTCCAGCTT |
| | | | CGCTCCCAGTCAGAACCTGTTCAAGCTGGCCAACCCGCTGGTGGACCAGT |
| | | | ACTTGTACCGCTTCGTGAGCACAAATAACACTGGCGGAGTCCAGTTCAAC |
| | | | AAGAACCTGGCCGGGAGATACGCCAACACCTACAAAAACTGGTTCCCGGG |
| | | | GCCCATGGGCCGAACCCAGGGCTGGAACCTGGGCTCCGGGGTCAACCGCG |
| | | | CCAGTGTCAGCGCCTTCGCCACGACCAATAGGATGGAGCTCGAGGGCGCG |
| | | | AGTTACCAGGTGCCCCCGCAGCCGAACGGCATGACCAACAACCTCCAGGG |
| | | | CAGCAACACCTATGCCCTGGAGAACACTATGATCTTCAACAGCCAGCCGG |
| | | | CGAACCCGGGCACCACCGCCACGTACCTCGAGGGCAACATGCTCATCACC |
| | | | AGCGAGAGCGAGACACAGCCGGTGAACCGCGTGGCGTACAACGTCGGCGG |
| | | | GCAGATGGCCACCAACAACCAGAGCTCCACCACTGCCCCCGCGACCGGCA |
| | | | CGTACAACCTCCAGGAAATCGTGCCCGGCAGCGTGTGGATGGAGAGGGAC |
| | | | GTGTACCTCCAAGGACCCATCTGGGCCAAGATCCCAGAGACAGGGGCGCA |
| | | | CTTTCACCCCTCTCCGGCCATGGGCGGATTCGGACTCAAACACCCACCGC |
| | | | CCATGATGCTCATCAAGAACACGCCTGTGCCCGGAAATATCACCAGCTTC |
| | | | TCGGACGTGCCCGTCAGCAGCTTCATCACCCAGTACAGCACCGGGCAGGT |
| | | | CACCGTGGAGATGGAGTGGGAGCTCAAGAAGGAAAACTCCAAGAGGTGGA |
| | | | ACCCAGAGATCCAGTACACAAACAACTACAACGACCCCCAGTTTGTGGAC |
| | | | TTTGCCCCGGACAGCACCGGGGAATACAGAACCACCAGACCTATCGGAAC |
| | | | CCGATACCTTACCCGACCCCTTTAA |
| 315 | 79 | MAAP_aa | MHSIKIKPVVLCCLVITISDPETGSIEESLSTGQTRSRESTTSRTTSSLR |
| | | | RETTPTSSTTTRTPSFRRSSPTTHPSGETSERQSFRPRKGFSNLLAWLKR |
| | | | VLRRPLPESG* |
| 316 | 79 | MAAP_nt | ATGCACAGCATCAAGATCAAGCCCGTGGTCTTGTGCTGCCTGGTTATAAC |
| | | | TATCTCGGACCCGGAAACGGGCTCGATCGAGGAGAGCCTGTCAACAGGGC |
| | | | AGACGAGGTCGCGCGAGAGCACGACATCTCGTACAACGAGCAGCTTGAGG |
| | | | CGGGAGACAACCCCTACCTCAAGTACAACCACGCGGACGCCGAGTTTCAG |
| | | | GAGAAGCTCGCCGACGACACATCCTTCGGGGGAAACCTCGGAAAGGCAGT |
| | | | CTTTCAGGCCAAGAAAAGGGTTCTCGAACCTTTTGGCCTGGTTGAAGAGG |
| | | | GTGCTAAGACGGCCCCTACCGGAAAGCGGATAG |
| 317 | 80 | VP1_aa | MSFVDHPPDWLEEVGEGLREFLGLEAGPPKPKPNQQHQDQARGLVLPGYN |
| | | | YLGPGNGLDRGEPVNAADEVAREHDIAYDEQLKAGDNPYLKYNHADAEFQ |
| | | | EKLADDTSFGGNLGKAVFQAKKRVLEPFGLVEEGAKTAPTGKRIDDHFPK |
| | | | RKKARTEEDSKPSTSSDAEAGPSGSQQLQIPAQPASSLGADTMSAGGGGP |
| | | | LGDNNQGADGVGNASGDWHCDSTWMGDRVVTKSTRTWVLPSYNNHQYREI |
| | | | KSGSVDGSNANAYFGYSTPWGYFDFNRFHSHWSPRDWQRLINNYWGFRPR |
| | | | SLRVKIFNIQVKEVTVQDSTTTIANNLTSTVQVFTDDDYQLPYVVGNGTE |
| | | | GCLPAFPPQVFTLPQYGYATLNRDNTENPTERSSFFCLEYFPSKMLRTGN |
| | | | NFEFTYNFEEVPFHSSFAPSQNLFKLANPLVDQYLYRFVSTNNTGGVQFN |
| | | | KNLAGRYANTYKNWFPGPMGRTQGWNLGSGVNRASVSAFATTNRMELEGA |
| | | | SYQVPPQPNGMTNNLQGSNTYALENTMIFNSQPANPGTTATYLEGNMLIT |
| | | | SESETQPVNRVAYNVGGQMATNNQSSTTAPATGTYNLQEIVPGSVWMERD |
| | | | VYLQGPIWAKIPETGAHFHPSPAMGGFGLKHPPPMMLIKNTPVPGNITSF |
| | | | SDVPVSSFITQYSTGQVTVEMEWELKKENSKRWNPEIQYTNNYNDPQFVD |
| | | | FAPDSTGEYRTTRPIGTRYLTRPL* |
| 318 | 80 | VP1_nt | ATGTCTTTTGTTGATCACCCTCCAGATTGGTTGGAAGAAGTTGGTGAAGG |
| | | | TCTTCGCGAGTTTTTGGGCCTTGAAGCGGGCCCACCGAAACCAAAACCCA |
| | | | ATCAGCAGCATCAAGATCAAGCCCGTGGTCTTGTGCTGCCTGGTTATAAC |
| | | | TATCTCGGACCCGGAAACGGGCTCGATCGAGGAGAGCCTGTCAACGCTGC |
| | | | AGACGAGGTCGCGCGAGAGCACGACATCGCGTACGATGAGCAGCTTAAAG |
| | | | CGGGAGACAACCCCTACCTCAAGTACAACCACGCGGACGCCGAGTTTCAG |
| | | | GAGAAGCTCGCCGACGACACATCCTTCGGGGGAAACCTCGGAAAGGCAGT |
| | | | CTTTCAGGCCAAGAAAAGGGTTCTCGAACCTTTTGGCCTGGTTGAAGAGG |
| | | | GTGCTAAGACGGCCCCTACCGGAAAGCGGATAGACGACCACTTTCCAAAA |
| | | | AGAAAGAAGGCTCGGACCGAAGAGGACTCCAAGCCTTCCACCTCGTCAGA |
| | | | CGCCGAAGCTGGACCCAGCGGATCCCAGCAGCTGCAAATCCCAGCCCAAC |
| | | | CAGCCTCAAGTTTGGGAGCTGATACAATGTCTGCGGGAGGTGGCGGCCCA |
| | | | TTGGGCGACAATAACCAAGGTGCCGATGGAGTGGGCAATGCCTCGGGAGA |
| | | | TTGGCATTGCGATTCCACGTGGATGGGGGACAGAGTCGTCACCAAGTCCA |
| | | | CCCGAACCTGGGTGCTGCCCAGCTACAACAACCACCAGTACCGAGAGATC |
| | | | AAAAGCGGCTCCGTCGACGGAAGCAACGCCAACGCCTACTTTGGATACAG |
| | | | CACCCCCTGGGGGTACTTTGACTTTAACCGCTTCCACAGCCACTGGAGCC |
| | | | CCCGAGACTGGCAAAGACTCATCAACAACTACTGGGGCTTCAGACCCCGG |
| | | | TCCCTCAGAGTCAAAATCTTCAACATTCAAGTCAAAGAGGTCACGGTGCA |
| | | | GGACTCCACCACCACCATCGCCAACAACCTCACCTCCACCGTCCAAGTGT |
| | | | TTACGGACGACGACTACCAGCTGCCCTACGTCGTCGGCAACGGGACCGAG |
| | | | GGATGCCTGCCGGCCTTCCCTCCGCAGGTCTTTACGCTGCCGCAGTACGG |
| | | | TTACGCGACGCTGAACCGCGACAACACAGAAAATCCCACCGAGAGGAGCA |
| | | | GCTTCTTCTGCCTAGAGTACTTTCCCAGCAAGATGCTGAGAACGGGCAAC |
| | | | AACTTTGAGTTTACCTACAACTTTGAGGAGGTGCCCTTCCACTCCAGCTT |
| | | | CGCTCCCAGTCAGAACCTGTTCAAGCTGGCCAACCCGCTGGTGGACCAGT |
| | | | ACTTGTACCGCTTCGTGAGCACAAATAACACTGGCGGAGTCCAGTTCAAC |
| | | | AAGAACCTGGCCGGGAGATACGCCAACACCTACAAAAACTGGTTCCCGGG |
| | | | GCCCATGGGCCGAACCCAGGGCTGGAACCTGGGCTCCGGGGTCAACCGCG |
| | | | CCAGTGTCAGCGCCTTCGCCACGACCAATAGGATGGAGCTCGAGGGCGCG |
| | | | AGTTACCAGGTGCCCCCGCAGCCGAACGGCATGACCAACAACCTCCAGGG |
| | | | CAGCAACACCTATGCCCTGGAGAACACTATGATCTTCAACAGCCAGCCGG |
| | | | CGAACCCGGGCACCACCGCCACGTACCTCGAGGGCAACATGCTCATCACC |
| | | | AGCGAGAGCGAGACACAGCCGGTGAACCGCGTGGCGTACAACGTCGGCGG |
| | | | GCAGATGGCCACCAACAACCAGAGCTCCACCACTGCCCCCGCGACCGGCA |
| | | | CGTACAACCTCCAGGAAATCGTGCCCGGCAGCGTGTGGATGGAGAGGGAC |
| | | | GTGTACCTCCAAGGACCCATCTGGGCCAAGATCCCAGAGACAGGGGCGCA |
| | | | CTTTCACCCCTCTCCGGCCATGGGCGGATTCGGACTCAAACACCCACCGC |
| | | | CCATGATGCTCATCAAGAACACGCCTGTGCCCGGAAATATCACCAGCTTC |
| | | | TCGGACGTGCCCGTCAGCAGCTTCATCACCCAGTACAGCACCGGGCAGGT |
| | | | CACCGTGGAGATGGAGTGGGAGCTCAAGAAGGAAAACTCCAAGAGGTGGA |
| | | | ACCCAGAGATCCAGTACACAAACAACTACAACGACCCCCAGTTTGTGGAC |
| | | | TTTGCCCCGGACAGCACCGGGGAATACAGAACCACCAGACCTATCGGAAC |
| | | | CCGATACCTTACCCGACCCCTTTAA |
| 319 | 80 | MAAP_aa | MSSLKRETTPTSSTTTRTPSFRRSSPTTHPSGETSERQSFRPRKGFSNLL |
| | | | AWLKRVLRRPLPESG* |
| 320 | 80 | MAAP_nt | ATGAGCAGCTTAAAGCGGGAGACAACCCCTACCTCAAGTACAACCACGCG |
| | | | GACGCCGAGTTTCAGGAGAAGCTCGCCGACGACACATCCTTCGGGGGAAA |
| | | | CCTCGGAAAGGCAGTCTTTCAGGCCAAGAAAAGGGTTCTCGAACCTTTTG |
| | | | GCCTGGTTGAAGAGGGTGCTAAGACGGCCCCTACCGGAAAGCGGATAG |

[0294] Exemplary reference, e.g., wildtype, MAAP encoding sequences, MAAP polypeptide sequences, Cap (e.g., VP1, VP2, and VP3) polypeptide or nucleic acid sequences, and Rep polypeptide or nucleic acid sequences are provided in Table 3.

TABLE 3

| Name | Description | Amino acid sequence | Nucleotide sequence |
|---|---|---|---|
| AAV5 | The full | MSFVDHPPDWLEEVGEGLREFLGLEAG | ATGTCTTTTGTTGATCACCCTCCAGATT |
| VP1 | wild type | PPKPKPNQQHQDQARGLVLPGYNYLGP | GGTTGGAAGAAGTTGGTGAAGGTCTTCG |
| | sequence of | GNGLDRGEPVNRADEVAREHDISYNEQ | CGAGTTTTTGGGCCTTGAAGCGGGCCCA |
| | AAV5 VP1 | LEAGDNPYLKYNHADAEFQEKLADDTS | CCGAAACCAAAACCCAATCAGCAGCATC |
| | | FGGNLGKAVFQAKKRVLEPFGLVEEGA | AAGATCAAGCCCGTGGTCTTGTGCTGCC |
| | | KTAPTGKRIDDHFPKRKKARTEEDSKP | TGGTTATAACTATCTCGGACCCGGAAAC |
| | | STSSDAEAGPSGSQQLQIPAQPASSLG | GGGCTCGATCGAGGAGAGCCTGTCAACA |
| | | ADTMSAGGGGPLGDNNQGADGVGNASG | GGGCAGACGAGGTCGCGCGAGAGCACGA |
| | | DWHCDSTWMGDRVVTKSTRTWVLPSYN | CATCTCGTACAACGAGCAGCTTGAGGCG |
| | | NHQYREIKSGSVDGSNANAYFGYSTPW | GGAGACAACCCCTACCTCAAGTACAACC |
| | | GYFDFNRFHSHWSPRDWQRLINNYWGF | ACGCGGACGCCGAGTTTCAGGAGAAGCT |
| | | RPRSLRVKIFNIQVKEVTVQDSTTTIA | CGCCGACGACACATCCTTCGGGGGAAAC |
| | | NNLTSTVQVFTDDDYQLPYVVGNGTEG | CTCGGAAAGGCAGTCTTTCAGGCCAAGA |
| | | CLPAFPPQVFTLPQYGYATLNRDNTEN | AAAGGGTTCTCGAACCTTTTGGCCTGGT |
| | | PTERSSFFCLEYFPSKMLRTGNNFEFT | TGAAGAGGGTGCTAAGACGGCCCCTACC |
| | | YNFEEVPFHSSFAPSQNLFKLANPLVD | GGAAAGCGGATAGACGACCACTTTCCAA |
| | | QYLYRFVSTNNTGGVQFNKNLAGRYAN | AAAGAAAGAAGGCTCGGACCGAAGAGGA |
| | | TYKNWFPGPMGRTQGWNLGSGVNRASV | CTCCAAGCCTTCCACCTCGTCAGACGCC |
| | | SAFATTNRMELEGASYQVPPQPNGMTN | GAAGCTGGACCCAGCGGATCCCAGCAGC |
| | | NLQGSNTYALENTMIFNSQPANPGTTA | TGCAAATCCCAGCCCAACCAGCCTCAAG |
| | | TYLEGNMLITSESETQPVNRVAYNVGG | TTTGGGAGCTGATACAATGTCTGCGGGA |
| | | QMATNNQSSTTAPATGTYNLQEIVPGS | GGTGGCGGCCCATTGGGCGACAATAACC |
| | | VWMERDVYLQGPIWAKIPETGAHFHPS | AAGGTGCCGATGGAGTGGGCAATGCCTC |
| | | PAMGGFGLKHPPPMMLIKNTPVPGNIT | GGGAGATTGGCATTGCGATTCCACGTGG |
| | | SFSDVPVSSFITQYSTGQVTVEMEWEL | ATGGGGGACAGAGTCGTCACCAAGTCCA |
| | | KKENSKRWNPEIQYTNNYNDPQFVDFA | CCCGAACCTGGGTGCTGCCCAGCTACAA |
| | | PDSTGEYRTTRPIGTRYLTRPL* | CAACCACCAGTACCGAGAGATCAAAAGC |
| | | (SEQ ID NO: 321) | GGCTCCGTCGACGGAAGCAACGCCAACG |
| | | | CCTACTTTGGATACAGCACCCCCTGGGG |
| | | | GTACTTTGACTTTAACCGCTTCCACAGC |
| | | | CACTGGAGCCCCCGAGACTGGCAAAGAC |
| | | | TCATCAACAACTACTGGGGCTTCAGACC |
| | | | CCGGTCCCTCAGAGTCAAAATCTTCAAC |
| | | | ATTCAAGTCAAAGAGGTCACGGTGCAGG |
| | | | ACTCCACCACCACCATCGCCAACAACCT |
| | | | CACCTCCACCGTCCAAGTGTTTACGGAC |
| | | | GACGACTACCAGCTGCCCTACGTCGTCG |
| | | | GCAACGGGACCGAGGGATGCCTGCCGGC |
| | | | CTTCCCTCCGCAGGTCTTTACGCTGCCG |
| | | | CAGTACGGTTACGCGACGCTGAACCGCG |
| | | | ACAACACAGAAAATCCCACCGAGAGGAG |
| | | | CAGCTTCTTCTGCCTAGAGTACTTTCCC |
| | | | AGCAAGATGCTGAGAACGGGCAACAACT |
| | | | TTGAGTTTACCTACAACTTTGAGGAGGT |
| | | | GCCCTTCCACTCCAGCTTCGCTCCCAGT |
| | | | CAGAACCTGTTCAAGCTGGCCAACCCGC |
| | | | TGGTGGACCAGTACTTGTACCGCTTCGT |
| | | | GAGCACAAATAACACTGGCGGAGTCCAG |
| | | | TTCAACAAGAACCTGGCCGGGAGATACG |
| | | | CCAACACCTACAAAAACTGGTTCCCGGG |
| | | | GCCCATGGGCCGAACCCAGGGCTGGAAC |
| | | | CTGGGCTCCGGGGTCAACCGCGCCAGTG |
| | | | TCAGCGCCTTCGCCACGACCAATAGGAT |
| | | | GGAGCTCGAGGGCGCGAGTTACCAGGTG |
| | | | CCCCCGCAGCCGAACGGCATGACCAACA |
| | | | ACCTCCAGGGCAGCAACACCTATGCCCT |
| | | | GGAGAACACTATGATCTTCAACAGCCAG |
| | | | CCGGCGAACCCGGGCACCACCGCCACGT |
| | | | ACCTCGAGGGCAACATGCTCATCACCAG |
| | | | CGAGAGCGAGACACAGCCGGTGAACCGC |
| | | | GTGGCGTACAACGTCGGCGGGCAGATGG |
| | | | CCACCAACAACCAGAGCTCCACCACTGC |
| | | | CCCCGCGACCGGCACGTACAACCTCCAG |
| | | | GAAATCGTGCCCGGCAGCGTGTGGATGG |
| | | | AGAGGGACGTGTACCTCCAAGGACCCAT |
| | | | CTGGGCCAAGATCCCAGAGACAGGGGCG |
| | | | CACTTTCACCCCTCTCCGGCCATGGGCG |
| | | | GATTCGGACTCAAACACCCACCGCCCAT |
| | | | GATGCTCATCAAGAACACGCCTGTGCCC |
| | | | GGAAATATCACCAGCTTCTCGGACGTGC |
| | | | CCGTCAGCAGCTTCATCACCCAGTACAG |
| | | | CACCGGGCAGGTCACCGTGGAGATGGAG |
| | | | TGGGAGCTCAAGAAGGAAAACTCCAAGA |
| | | | GGTGGAACCCAGAGATCCAGTACACAAA |
| | | | CAACTACAACGACCCCCAGTTTGTGGAC |
| | | | TTTGCCCCGGACAGCACCGGGGAATACA |
| | | | GAACCACCAGACCTATCGGAACCCGATA |
| | | | CCTTACCCGACCCCTTTAA (SEQ TD |
| | | | NO: 327) |
| AAV5 | The full | TAPTGKRIDDHFPKRKKARTEEDSKPS | ACGGCCCCTACCGGAAAGCGGATAGACG |
| VP2 | wild type | TSSDAEAGPSGSQQLQIPAQPASSLGA | ACCACTTTCCAAAAAGAAAGAAGGCTCG |
| | sequence of | DTMSAGGGGPLGDNNQGADGVGNASGD | GACCGAAGAGGACTCCAAGCCTTCCACC |
| | AAV5 VP2 | WHCDSTWMGDRVVTKSTRTWVLPSYNN | TCGTCAGACGCCGAAGCTGGACCCAGCG |
| | | HQYREIKSGSVDGSNANAYFGYSTPWG | GATCCCAGCAGCTGCAAATCCCAGCCCA |
| | | YFDFNRFHSHWSPRDWQRLINNYWGFR | ACCAGCCTCAAGTTTGGGAGCTGATACA |
| | | PRSLRVKIFNIQVKEVTVQDSTTTIAN | ATGTCTGCGGGAGGTGGCGGCCCATTGG |
| | | NLTSTVQVFTDDDYQLPYVVGNGTEGC | GCGACAATAACCAAGGTGCCGATGGAGT |
| | | LPAFPPQVFTLPQYGYATLNRDNTENP | GGGCAATGCCTCGGGAGATTGGCATTGC |
| | | TERSSFFCLEYFPSKMLRTGNNFEFTY | GATTCCACGTGGATGGGGGACAGAGTCG |
| | | NFEEVPFHSSFAPSQNLFKLANPLVDQ | TCACCAAGTCCACCCGAACCTGGGTGCT |
| | | YLYRFVSTNNTGGVQFNKNLAGRYANT | GCCCAGCTACAACAACCACCAGTACCGA |
| | | YKNWFPGPMGRTQGWNLGSGVNRASVS | GAGATCAAAAGCGGCTCCGTCGACGGAA |
| | | AFATTNRMELEGASYQVPPQPNGMTNN | GCAACGCCAACGCCTACTTTGGATACAG |
| | | LQGSNTYALENTMIFNSQPANPGTTAT | CACCCCCTGGGGGTACTTTGACTTTAAC |
| | | YLEGNMLITSESETQPVNRVAYNVGGQ | CGCTTCCACAGCCACTGGAGCCCCCGAG |
| | | MATNNQSSTTAPATGTYNLQEIVPGSV | ACTGGCAAAGACTCATCAACAACTACTG |
| | | WMERDVYLQGPIWAKIPETGAHFHPSP | GGGCTTCAGACCCCGGTCCCTCAGAGTC |
| | | AMGGFGLKHPPPMMLIKNTPVPGNITS | AAAATCTTCAACATTCAAGTCAAAGAGG |
| | | FSDVPVSSFITQYSTGQVTVEMEWELK | TCACGGTGCAGGACTCCACCACCACCAT |
| | | KENSKRWNPEIQYTNNYNDPQFVDFAP | CGCCAACAACCTCACCTCCACCGTCCAA |
| | | DSTGEYRTTRPIGTRYLTRPL* (SEQ | GTGTTTACGGACGACGACTACCAGCTGC |
| | | ID NO: 322) | CCTACGTCGTCGGCAACGGGACCGAGGG |
| | | | ATGCCTGCCGGCCTTCCCTCCGCAGGTC |
| | | | TTTACGCTGCCGCAGTACGGTTACGCGA |
| | | | CGCTGAACCGCGACAACACAGAAAATCC |
| | | | CACCGAGAGGAGCAGCTTCTTCTGCCTA |
| | | | GAGTACTTTCCCAGCAAGATGCTGAGAA |
| | | | CGGGCAACAACTTTGAGTTTACCTACAA |
| | | | CTTTGAGGAGGTGCCCTTCCACTCCAGC |
| | | | TTCGCTCCCAGTCAGAACCTGTTCAAGC |
| | | | TGGCCAACCCGCTGGTGGACCAGTACTT |
| | | | GTACCGCTTCGTGAGCACAAATAACACT |
| | | | GGCGGAGTCCAGTTCAACAAGAACCTGG |
| | | | CCGGGAGATACGCCAACACCTACAAAAA |
| | | | CTGGTTCCCGGGGCCCATGGGCCGAACC |
| | | | CAGGGCTGGAACCTGGGCTCCGGGGTCA |
| | | | ACCGCGCCAGTGTCAGCGCCTTCGCCAC |
| | | | GACCAATAGGATGGAGCTCGAGGGCGCG |
| | | | AGTTACCAGGTGCCCCCGCAGCCGAACG |
| | | | GCATGACCAACAACCTCCAGGGCAGCAA |
| | | | CACCTATGCCCTGGAGAACACTATGATC |
| | | | TTCAACAGCCAGCCGGCGAACCCGGGCA |
| | | | CCACCGCCACGTACCTCGAGGGCAACAT |
| | | | GCTCATCACCAGCGAGAGCGAGACACAG |
| | | | CCGGTGAACCGCGTGGCGTACAACGTCG |
| | | | GCGGGCAGATGGCCACCAACAACCAGAG |
| | | | CTCCACCACTGCCCCCGCGACCGGCACG |
| | | | TACAACCTCCAGGAAATCGTGCCCGGCA |
| | | | GCGTGTGGATGGAGAGGGACGTGTACCT |
| | | | CCAAGGACCCATCTGGGCCAAGATCCCA |
| | | | GAGACAGGGGCGCACTTTCACCCCTCTC |
| | | | CGGCCATGGGCGGATTCGGACTCAAACA |
| | | | CCCACCGCCCATGATGCTCATCAAGAAC |
| | | | ACGCCTGTGCCCGGAAATATCACCAGCT |
| | | | TCTCGGACGTGCCCGTCAGCAGCTTCAT |
| | | | CACCCAGTACAGCACCGGGCAGGTCACC |
| | | | GTGGAGATGGAGTGGGAGCTCAAGAAGG |
| | | | AAAACTCCAAGAGGTGGAACCCAGAGAT |
| | | | CCAGTACACAAACAACTACAACGACCCC |
| | | | CAGTTTGTGGACTTTGCCCCGGACAGCA |
| | | | CCGGGGAATACAGAACCACCAGACCTAT |
| | | | CGGAACCCGATACCTTACCCGACCCCTT |
| | | | TAA (SEQ ID NO: 328) |
| AAV5 | The wild | MSAGGGGPLGDNNQGADGVGNASGDWH | ATGTCTGCGGGAGGTGGCGGCCCATTGG |
| VP3 | type | CDSTWMGDRVVTKSTRTWVLPSYNNHQ | GCGACAATAACCAAGGTGCCGATGGAGT |
| | sequence of | YREIKSGSVDGSNANAYFGYSTPWGYF | GGGCAATGCCTCGGGAGATTGGCATTGC |
| | AAV5 VP3 | DENRFHSHWSPRDWQRLINNYWGFRPR | GATTCCACGTGGATGGGGGACAGAGTCG |
| | | SLRVKIFNIQVKEVTVQDSTTTIANNL | TCACCAAGTCCACCCGAACCTGGGTGCT |
| | | TSTVQVFTDDDYQLPYVVGNGTEGCLP | GCCCAGCTACAACAACCACCAGTACCGA |
| | | AFPPQVFTLPQYGYATLNRDNTENPTE | GAGATCAAAAGCGGCTCCGTCGACGGAA |
| | | RSSFFCLEYFPSKMLRTGNNFEFTYNF | GCAACGCCAACGCCTACTTTGGATACAG |
| | | EEVPFHSSFAPSQNLFKLANPLVDQYL | CACCCCCTGGGGGTACTTTGACTTTAAC |
| | | YRFVSTNNTGGVQFNKNLAGRYANTYK | CGCTTCCACAGCCACTGGAGCCCCCGAG |
| | | NWFPGPMGRTQGWNLGSGVNRASVSAF | ACTGGCAAAGACTCATCAACAACTACTG |
| | | ATTNRMELEGASYQVPPQPNGMTNNLQ | GGGCTTCAGACCCCGGTCCCTCAGAGTC |
| | | GSNTYALENTMIFNSQPANPGTTATYL | AAAATCTTCAACATTCAAGTCAAAGAGG |
| | | EGNMLITSESETQPVNRVAYNVGGQMA | TCACGGTGCAGGACTCCACCACCACCAT |
| | | TNNQSSTTAPATGTYNLQEIVPGSVWM | CGCCAACAACCTCACCTCCACCGTCCAA |
| | | ERDVYLQGPIWAKIPETGAHFHPSPAM | GTGTTTACGGACGACGACTACCAGCTGC |
| | | GGFGLKHPPPMMLIKNTPVPGNITSFS | CCTACGTCGTCGGCAACGGGACCGAGGG |
| | | DVPVSSFITQYSTGQVTVEMEWELKKE | ATGCCTGCCGGCCTTCCCTCCGCAGGTC |
| | | NSKRWNPEIQYTNNYNDPQFVDFAPDS | TTTACGCTGCCGCAGTACGGTTACGCGA |
| | | TGEYRTTRPIGTRYLTRPL* (SEQ | CGCTGAACCGCGACAACACAGAAAATCC |
| | | ID NO: 323) | CACCGAGAGGAGCAGCTTCTTCTGCCTA |
| | | | GAGTACTTTCCCAGCAAGATGCTGAGAA |
| | | | CGGGCAACAACTTTGAGTTTACCTACAA |
| | | | CTTTGAGGAGGTGCCCTTCCACTCCAGC |
| | | | TTCGCTCCCAGTCAGAACCTGTTCAAGC |
| | | | TGGCCAACCCGCTGGTGGACCAGTACTT |
| | | | GTACCGCTTCGTGAGCACAAATAACACT |
| | | | GGCGGAGTCCAGTTCAACAAGAACCTGG |
| | | | CCGGGAGATACGCCAACACCTACAAAAA |
| | | | CTGGTTCCCGGGGCCCATGGGCCGAACC |
| | | | CAGGGCTGGAACCTGGGCTCCGGGGTCA |
| | | | ACCGCGCCAGTGTCAGCGCCTTCGCCAC |
| | | | GACCAATAGGATGGAGCTCGAGGGCGCG |
| | | | AGTTACCAGGTGCCCCCGCAGCCGAACG |
| | | | GCATGACCAACAACCTCCAGGGCAGCAA |
| | | | CACCTATGCCCTGGAGAACACTATGATC |
| | | | TTCAACAGCCAGCCGGCGAACCCGGGCA |
| | | | CCACCGCCACGTACCTCGAGGGCAACAT |
| | | | GCTCATCACCAGCGAGAGCGAGACACAG |
| | | | CCGGTGAACCGCGTGGCGTACAACGTCG |
| | | | GCGGGCAGATGGCCACCAACAACCAGAG |
| | | | CTCCACCACTGCCCCCGCGACCGGCACG |
| | | | TACAACCTCCAGGAAATCGTGCCCGGCA |
| | | | GCGTGTGGATGGAGAGGGACGTGTACCT |
| | | | CCAAGGACCCATCTGGGCCAAGATCCCA |
| | | | GAGACAGGGGCGCACTTTCACCCCTCTC |
| | | | CGGCCATGGGCGGATTCGGACTCAAACA |
| | | | CCCACCGCCCATGATGCTCATCAAGAAC |
| | | | ACGCCTGTGCCCGGAAATATCACCAGCT |
| | | | TCTCGGACGTGCCCGTCAGCAGCTTCAT |
| | | | CACCCAGTACAGCACCGGGCAGGTCACC |
| | | | GTGGAGATGGAGTGGGAGCTCAAGAAGG |
| | | | AAAACTCCAAGAGGTGGAACCCAGAGAT |
| | | | CCAGTACACAAACAACTACAACGACCCC |
| | | | CAGTTTGTGGACTTTGCCCCGGACAGCA |
| | | | CCGGGGAATACAGAACCACCAGACCTAT |
| | | | CGGAACCCGATACCTTACCCGACCCCTT |
| | | | TAA (SEQ ID NO: 329) |
| AAV5 | This is the | RAHRNQNPISSIKIKPVVLCCLVITIS | CGGGCCCACCGAAACCAAAACCCAATCA |
| MAAP | full | DPETGSIEESLSTGQTRSRESTTSRTT | GCAGCATCAAGATCAAGCCCGTGGTCTT |
| (AAV2 | subsequence | SSLRRETTPTSSTTTRIPSFRRSSPTT | GTGCTGCCTGGTTATAACTATCTCGGAC |
| coordin | of AAV5 | HPSGETSERQSFRPRKGFSNLLAWLKR | CCGGAAACGGGCTCGATCGAGGAGAGCC |
| ates) | which | VLRRPLPESG* (SEQ ID NO: | TGTCAACAGGGCAGACGAGGTCGCGCGA |
| | corresponds | 325) | GAGCACGACATCTCGTACAACGAGCAGC |
| | to the | | TTGAGGCGGGAGACAACCCCTACCTCAA |
| | location of | | GTACAACCACGCGGACGCCGAGTTTCAG |
| | MAAP in | | GAGAAGCTCGCCGACGACACATCCTTCG |
| | AAV2. | | GGGGAAACCTCGGAAAGGCAGTCTTTCA |
| | Note that | | GGCCAAGAAAAGGGTTCTCGAACCTTTT |
| | this | | GGCCTGGTTGAAGAGGGTGCTAAGACGG |
| | sequence | | CCCCTACCGGAAAGCGGATAG (SEQ |
| | does not | | ID NO: 331) |
| | begin with a | | |
| | CTG. | | |
| AAV5 | The | LDPADPSSCKSQPNQPQVWELIQCLRE | CTGGACCCAGCGGATCCCAGCAGCTGCA |
| AAP | sequence of | VAAHWATITKVPMEWAMPREIGIAIPR | AATCCCAGCCCAACCAGCCTCAAGTTTG |
| | AAP in | GWGTESSPSPPEPGCCPATTTTSTERS | GGAGCTGATACAATGTCTGCGGGAGGTG |
| | AAV5 | KAAPSTEATPTPTLDTAPPGGTLTLTA | GCGGCCCATTGGGCGACAATAACCAAGG |
| | | STATGAPETGKDSSTTTGASDPGPSES | TGCCGATGGAGTGGGCAATGCCTCGGGA |
| | | KSSTFKSKRSRCRTPPPPSPTTSPPPS | GATTGGCATTGCGATTCCACGTGGATGG |
| | | KCLRTTTTSCPTSSATGPRDACRPSLR | GGGACAGAGTCGTCACCAAGTCCACCCG |
| | | RSLRCRSTVTRR* (SEQ ID NO: | AACCTGGGTGCTGCCCAGCTACAACAAC |
| | | 326) | CACCAGTACCGAGAGATCAAAAGCGGCT |
| | | | CCGTCGACGGAAGCAACGCCAACGCCTA |
| | | | CTTTGGATACAGCACCCCCTGGGGGTAC |
| | | | TTTGACTTTAACCGCTTCCACAGCCACT |
| | | | GGAGCCCCCGAGACTGGCAAAGACTCAT |
| | | | CAACAACTACTGGGGCTTCAGACCCCGG |
| | | | TCCCTCAGAGTCAAAATCTTCAACATTC |
| | | | AAGTCAAAGAGGTCACGGTGCAGGACTC |
| | | | CACCACCACCATCGCCAACAACCTCACC |
| | | | TCCACCGTCCAAGTGTTTACGGACGACG |
| | | | ACTACCAGCTGCCCTACGTCGTCGGCAA |
| | | | CGGGACCGAGGGATGCCTGCCGGCCTTC |
| | | | CCTCCGCAGGTCTTTACGCTGCCGCAGT |
| | | | ACGGTTACGCGACGCTGA (SEQ TD |
| | | | NO: 332) |
| AAV2 | The longer | MPGFYEIVIKVPSDLDEHLPGISDSFV | ATGCCGGGGTTTTACGAGATTGTGATTA |
| Rep 68 | Rep | NWVAEKEWELPPDSDMDLNLIEQAPLT | AGGTCCCCAGCGACCTTGACGAGCATCT |
| | transcript | VAEKLQRDFLTEWRRVSKAPEALFFVQ | GCCCGGCATTTCTGACAGCTTTGTGAAC |
| | without | FEKGESYFHMHVLVETTGVKSMVLGRF | TGGGTGGCCGAGAAGGAATGGGAGTTGC |
| | splicing | LSQIREKLIQRIYRGIEPTLPNWFAVT | CGCCAGATTCTGACATGGATCTGAATCT |
| | | KTRNGAGGGNKVVDECYIPNYLLPKTQ | GATTGAGCAGGCACCCCTGACCGTGGCC |
| | | PELQWAWTNMEQYLSACLNLTERKRLV | GAGAAGCTGCAGCGCGACTTTCTGACGG |
| | | AQHLTHVSQTQEQNKENQNPNSDAPVI | AATGGCGCCGTGTGAGTAAGGCCCCGGA |
| | | RSKTSARYMELVGWLVDKGITSEKQWI | GGCCCTTTTCTTTGTGCAATTTGAGAAG |
| | | QEDQASYISFNAASNSRSQIKAALDNA | GGAGAGAGCTACTTCCACATGCACGTGC |
| | | GKIMSLTKTAPDYLVGQQPVEDISSNR | TCGTGGAAACCACCGGGGTGAAATCCAT |
| | | IYKILELNGYDPQYAASVFLGWATKKF | GGTTTTGGGACGTTTCCTGAGTCAGATT |
| | | GKRNTIWLFGPATTGKTNIAEAIAHTV | CGCGAAAAACTGATTCAGAGAATTTACC |
| | | PFYGCVNWTNENFPFNDCVDKMVIWWE | GCGGGATCGAGCCGACTTTGCCAAACTG |
| | | EGKMTAKVVESAKAILGGSKVRVDQKC | GTTCGCGGTCACAAAGACCAGAAATGGC |
| | | KSSAQIDPTPVIVTSNTNMCAVIDGNS | GCCGGAGGCGGGAACAAGGTGGTGGATG |
| | | TTFEHQQPLQDRMFKFELTRRLDHDFG | AGTGCTACATCCCCAATTACTTGCTCCC |
| | | KVTKQEVKDFFRWAKDHVVEVEHEFYV | CAAAACCCAGCCTGAGCTCCAGTGGGCG |
| | | KKGGAKKRPAPSDADISEPKRVRESVA | TGGACTAATATGGAACAGTATTTAAGCG |
| | | QPSTSDAEASINYADRLARGHSL* | CCTGTTTGAATCTCACGGAGCGTAAACG |
| | | (SEQ ID NO: 333) | GTTGGTGGCGCAGCATCTGACGCACGTG |
| | | | TCGCAGACGCAGGAGCAGAACAAAGAGA |
| | | | ATCAGAATCCCAATTCTGATGCGCCGGT |
| | | | GATCAGATCAAAAACTTCAGCCAGGTAC |
| | | | ATGGAGCTGGTCGGGTGGCTCGTGGACA |
| | | | AGGGGATTACCTCGGAGAAGCAGTGGAT |
| | | | CCAGGAGGACCAGGCCTCATACATCTCC |
| | | | TTCAATGCGGCCTCCAACTCGCGGTCCC |
| | | | AAATCAAGGCTGCCTTGGACAATGCGGG |
| | | | AAAGATTATGAGCCTGACTAAAACCGCC |
| | | | CCCGACTACCTGGTGGGCCAGCAGCCCG |
| | | | TGGAGGACATTTCCAGCAATCGGATTTA |
| | | | TAAAATTTTGGAACTAAACGGGTACGAT |
| | | | CCCCAATATGCGGCTTCCGTCTTTCTGG |
| | | | GATGGGCCACGAAAAAGTTCGGCAAGAG |
| | | | GAACACCATCTGGCTGTTTGGGCCTGCA |
| | | | ACTACCGGGAAGACCAACATCGCGGAGG |
| | | | CCATAGCCCACACTGTGCCCTTCTACGG |
| | | | GTGCGTAAACTGGACCAATGAGAACTTT |
| | | | CCCTTCAACGACTGTGTCGACAAGATGG |
| | | | TGATCTGGTGGGAGGAGGGGAAGATGAC |
| | | | CGCCAAGGTCGTGGAGTCGGCCAAAGCC |
| | | | ATTCTCGGAGGAAGCAAGGTGCGCGTGG |
| | | | ACCAGAAATGCAAGTCCTCGGCCCAGAT |
| | | | AGACCCGACTCCCGTGATCGTCACCTCC |
| | | | AACACCAACATGTGCGCCGTGATTGACG |
| | | | GGAACTCAACGACCTTCGAACACCAGCA |
| | | | GCCGTTGCAAGACCGGATGTTCAAATTT |
| | | | GAACTCACCCGCCGTCTGGATCATGACT |
| | | | TTGGGAAGGTCACCAAGCAGGAAGTCAA |
| | | | AGACTTTTTCCGGTGGGCAAAGGATCAC |
| | | | GTGGTTGAGGTGGAGCATGAATTCTACG |
| | | | TCAAAAAGGGTGGAGCCAAGAAAAGACC |
| | | | CGCCCCCAGTGACGCAGATATAAGTGAG |
| | | | CCCAAACGGGTGCGCGAGTCAGTTGCGC |
| | | | AGCCATCGACGTCAGACGCGGAAGCTTC |
| | | | GATCAACTACGCAGACAGGTACCAAAAC |
| | | | AAATGTTCTCGTCACGTGGGCATGAATC |
| | | | TGATGCTGTTTCCCTGCAGACAATGCGA |
| | | | GAGAATGAATCAGAATTCAAATATCTGC |
| | | | TTCACTCACGGACAGAAAGACTGTTTAG |
| | | | AGTGCTTTCCCGTGTCAGAATCTCAACC |
| | | | CGTTTCTGTCGTCAAAAAGGCGTATCAG |
| | | | AAACTGTGCTACATTCATCATATCATGG |
| | | | GAAAGGTGCCAGACGCTTGCACTGCCTG |
| | | | CGATCTGGTCAATGTGGATTTGGATGAC |
| | | | TGCATCTTTGAACAATAAATGATTTAAA |
| | | | TCAGGTATGGCTGCCGATGGTTATCTTC |
| | | | CAGATTGGCTCGAGGACACTCTCTCTGA |
| | | | (SEQ ID NO: 337) |
| AAV2 | The longer | MPGFYEIVIKVPSDLDEHLPGISDSFV | ATGCCGGGGTTTTACGAGATTGTGATTA |
| Rep 78 | Rep | NWVAEKEWELPPDSDMDLNLIEQAPLT | AGGTCCCCAGCGACCTTGACGAGCATCT |
| | transcript | VAEKLQRDFLTEWRRVSKAPEALFFVQ | GCCCGGCATTTCTGACAGCTTTGTGAAC |
| | with | FEKGESYFHMHVLVETTGVKSMVLGRF | TGGGTGGCCGAGAAGGAATGGGAGTTGC |
| | splicing | LSQIREKLIQRIYRGIEPTLPNWFAVT | CGCCAGATTCTGACATGGATCTGAATCT |
| | | KTRNGAGGGNKVVDECYIPNYLLPKTQ | GATTGAGCAGGCACCCCTGACCGTGGCC |
| | | PELQWAWTNMEQYLSACLNLTERKRLV | GAGAAGCTGCAGCGCGACTTTCTGACGG |
| | | AQHLTHVSQTQEQNKENQNPNSDAPVI | AATGGCGCCGTGTGAGTAAGGCCCCGGA |
| | | RSKTSARYMELVGWLVDKGITSEKQWI | GGCCCTTTTCTTTGTGCAATTTGAGAAG |
| | | QEDQASYISFNAASNSRSQIKAALDNA | GGAGAGAGCTACTTCCACATGCACGTGC |
| | | GKIMSLTKTAPDYLVGQQPVEDISSNR | TCGTGGAAACCACCGGGGTGAAATCCAT |
| | | IYKILELNGYDPQYAASVFLGWATKKF | GGTTTTGGGACGTTTCCTGAGTCAGATT |
| | | GKRNTIWLFGPATTGKTNIAEAIAHTV | CGCGAAAAACTGATTCAGAGAATTTACC |
| | | PFYGCVNWTNENFPFNDCVDKMVIWWE | GCGGGATCGAGCCGACTTTGCCAAACTG |
| | | EGKMTAKVVESAKAILGGSKVRVDQKC | GTTCGCGGTCACAAAGACCAGAAATGGC |
| | | KSSAQIDPTPVIVTSNTNMCAVIDGNS | GCCGGAGGCGGGAACAAGGTGGTGGATG |
| | | TTFEHQQPLQDRMFKFELTRRLDHDFG | AGTGCTACATCCCCAATTACTTGCTCCC |
| | | KVTKQEVKDFFRWAKDHVVEVEHEFYV | CAAAACCCAGCCTGAGCTCCAGTGGGCG |
| | | KKGGAKKRPAPSDADISEPKRVRESVA | TGGACTAATATGGAACAGTATTTAAGCG |
| | | QPSTSDAEASINYADRYQNKCSRHVGM | CCTGTTTGAATCTCACGGAGCGTAAACG |
| | | NLMLFPCRQCERMNQNSNICFTHGQKD | GTTGGTGGCGCAGCATCTGACGCACGTG |
| | | CLECFPVSESQPVSVVKKAYQKLCYIH | TCGCAGACGCAGGAGCAGAACAAAGAGA |
| | | HIMGKVPDACTACDLVNVDLDDCIFEQ | ATCAGAATCCCAATTCTGATGCGCCGGT |
| | | * (SEQ ID NO: 334) | GATCAGATCAAAAACTTCAGCCAGGTAC |
| | | | ATGGAGCTGGTCGGGTGGCTCGTGGACA |
| | | | AGGGGATTACCTCGGAGAAGCAGTGGAT |
| | | | CCAGGAGGACCAGGCCTCATACATCTCC |
| | | | TTCAATGCGGCCTCCAACTCGCGGTCCC |
| | | | AAATCAAGGCTGCCTTGGACAATGCGGG |
| | | | AAAGATTATGAGCCTGACTAAAACCGCC |
| | | | CCCGACTACCTGGTGGGCCAGCAGCCCG |
| | | | TGGAGGACATTTCCAGCAATCGGATTTA |
| | | | TAAAATTTTGGAACTAAACGGGTACGAT |
| | | | CCCCAATATGCGGCTTCCGTCTTTCTGG |
| | | | GATGGGCCACGAAAAAGTTCGGCAAGAG |
| | | | GAACACCATCTGGCTGTTTGGGCCTGCA |
| | | | ACTACCGGGAAGACCAACATCGCGGAGG |
| | | | CCATAGCCCACACTGTGCCCTTCTACGG |
| | | | GTGCGTAAACTGGACCAATGAGAACTTT |
| | | | CCCTTCAACGACTGTGTCGACAAGATGG |
| | | | TGATCTGGTGGGAGGAGGGGAAGATGAC |
| | | | CGCCAAGGTCGTGGAGTCGGCCAAAGCC |
| | | | ATTCTCGGAGGAAGCAAGGTGCGCGTGG |
| | | | ACCAGAAATGCAAGTCCTCGGCCCAGAT |
| | | | AGACCCGACTCCCGTGATCGTCACCTCC |
| | | | AACACCAACATGTGCGCCGTGATTGACG |
| | | | GGAACTCAACGACCTTCGAACACCAGCA |
| | | | GCCGTTGCAAGACCGGATGTTCAAATTT |
| | | | GAACTCACCCGCCGTCTGGATCATGACT |
| | | | TTGGGAAGGTCACCAAGCAGGAAGTCAA |
| | | | AGACTTTTTCCGGTGGGCAAAGGATCAC |
| | | | GTGGTTGAGGTGGAGCATGAATTCTACG |
| | | | TCAAAAAGGGTGGAGCCAAGAAAAGACC |
| | | | CGCCCCCAGTGACGCAGATATAAGTGAG |
| | | | CCCAAACGGGTGCGCGAGTCAGTTGCGC |
| | | | AGCCATCGACGTCAGACGCGGAAGCTTC |
| | | | GATCAACTACGCAGACAGGTACCAAAAC |
| | | | AAATGTTCTCGTCACGTGGGCATGAATC |
| | | | TGATGCTGTTTCCCTGCAGACAATGCGA |
| | | | GAGAATGAATCAGAATTCAAATATCTGC |
| | | | TTCACTCACGGACAGAAAGACTGTTTAG |
| | | | AGTGCTTTCCCGTGTCAGAATCTCAACC |
| | | | CGTTTCTGTCGTCAAAAAGGCGTATCAG |
| | | | AAACTGTGCTACATTCATCATATCATGG |
| | | | GAAAGGTGCCAGACGCTTGCACTGCCTG |
| | | | CGATCTGGTCAATGTGGATTTGGATGAC |
| | | | TGCATCTTTGAACAATAA (SEQ TD |
| | | | NO: 338) |
| AAV2 | The shorter | MELVGWLVDKGITSEKQWIQEDQASYI | ATGGAGCTGGTCGGGTGGCTCGTGGACA |
| Rep 52 | Rep | SFNAASNSRSQIKAALDNAGKIMSLTK | AGGGGATTACCTCGGAGAAGCAGTGGAT |
| | transcript | TAPDYLVGQQPVEDISSNRIYKILELN | CCAGGAGGACCAGGCCTCATACATCTCC |
| | without | GYDPQYAASVFLGWATKKFGKRNTIWL | TTCAATGCGGCCTCCAACTCGCGGTCCC |
| | splicing | FGPATTGKTNIAEAIAHTVPFYGCVNW | AAATCAAGGCTGCCTTGGACAATGCGGG |
| | | TNENFPFNDCVDKMVIWWEEGKMTAKV | AAAGATTATGAGCCTGACTAAAACCGCC |
| | | VESAKAILGGSKVRVDQKCKSSAQIDP | CCCGACTACCTGGTGGGCCAGCAGCCCG |
| | | TPVIVTSNTNMCAVIDGNSTTFEHQQP | TGGAGGACATTTCCAGCAATCGGATTTA |
| | | LQDRMFKFELTRRLDHDFGKVTKQEVK | TAAAATTTTGGAACTAAACGGGTACGAT |
| | | DFFRWAKDHVVEVEHEFYVKKGGAKKR | CCCCAATATGCGGCTTCCGTCTTTCTGG |
| | | PAPSDADISEPKRVRESVAQPSTSDAE | GATGGGCCACGAAAAAGTTCGGCAAGAG |
| | | ASINYADRYQNKCSRHVGMNLMLFPCR | GAACACCATCTGGCTGTTTGGGCCTGCA |
| | | QCERMNQNSNICFTHGQKDCLECFPVS | ACTACCGGGAAGACCAACATCGCGGAGG |
| | | ESQPVSVVKKAYQKLCYIHHIMGKVPD | CCATAGCCCACACTGTGCCCTTCTACGG |
| | | ACTACDLVNVDLDDCIFEQ* (SEQ | GTGCGTAAACTGGACCAATGAGAACTTT |
| | | ID NO: 335) | CCCTTCAACGACTGTGTCGACAAGATGG |
| | | | TGATCTGGTGGGAGGAGGGGAAGATGAC |
| | | | CGCCAAGGTCGTGGAGTCGGCCAAAGCC |
| | | | ATTCTCGGAGGAAGCAAGGTGCGCGTGG |
| | | | ACCAGAAATGCAAGTCCTCGGCCCAGAT |
| | | | AGACCCGACTCCCGTGATCGTCACCTCC |
| | | | AACACCAACATGTGCGCCGTGATTGACG |
| | | | GGAACTCAACGACCTTCGAACACCAGCA |
| | | | GCCGTTGCAAGACCGGATGTTCAAATTT |
| | | | GAACTCACCCGCCGTCTGGATCATGACT |
| | | | TTGGGAAGGTCACCAAGCAGGAAGTCAA |
| | | | AGACTTTTTCCGGTGGGCAAAGGATCAC |
| | | | GTGGTTGAGGTGGAGCATGAATTCTACG |
| | | | TCAAAAAGGGTGGAGCCAAGAAAAGACC |
| | | | CGCCCCCAGTGACGCAGATATAAGTGAG |
| | | | CCCAAACGGGTGCGCGAGTCAGTTGCGC |
| | | | AGCCATCGACGTCAGACGCGGAAGCTTC |
| | | | GATCAACTACGCAGACAGGTACCAAAAC |
| | | | AAATGTTCTCGTCACGTGGGCATGAATC |
| | | | TGATGCTGTTTCCCTGCAGACAATGCGA |
| | | | GAGAATGAATCAGAATTCAAATATCTGC |
| | | | TTCACTCACGGACAGAAAGACTGTTTAG |
| | | | AGTGCTTTCCCGTGTCAGAATCTCAACC |
| | | | CGTTTCTGTCGTCAAAAAGGCGTATCAG |
| | | | AAACTGTGCTACATTCATCATATCATGG |
| | | | GAAAGGTGCCAGACGCTTGCACTGCCTG |
| | | | CGATCTGGTCAATGTGGATTTGGATGAC |
| | | | TGCATCTTTGAACAATAA (SEQ TD |
| | | | NO: 339) |
| AAV2 | The shorter | MELVGWLVDKGITSEKQWIQEDQASYI | ATGGAGCTGGTCGGGTGGCTCGTGGACA |
| Rep 40 | Rep | SFNAASNSRSQIKAALDNAGKIMSLTK | AGGGGATTACCTCGGAGAAGCAGTGGAT |
| | transcript | TAPDYLVGQQPVEDISSNRIYKILELN | CCAGGAGGACCAGGCCTCATACATCTCC |
| | with | GYDPQYAASVFLGWATKKFGKRNTIWL | TTCAATGCGGCCTCCAACTCGCGGTCCC |
| | splicing | FGPATTGKTNIAEAIAHTVPFYGCVNW | AAATCAAGGCTGCCTTGGACAATGCGGG |
| | | TNENFPFNDCVDKMVIWWEEGKMTAKV | AAAGATTATGAGCCTGACTAAAACCGCC |
| | | VESAKAILGGSKVRVDQKCKSSAQIDP | CCCGACTACCTGGTGGGCCAGCAGCCCG |
| | | TPVIVTSNTNMCAVIDGNSTTFEHQQP | TGGAGGACATTTCCAGCAATCGGATTTA |
| | | LQDRMFKFELTRRLDHDFGKVTKQEVK | TAAAATTTTGGAACTAAACGGGTACGAT |
| | | DFFRWAKDHVVEVEHEFYVKKGGAKKR | CCCCAATATGCGGCTTCCGTCTTTCTGG |
| | | PAPSDADISEPKRVRESVAQPSTSDAE | GATGGGCCACGAAAAAGTTCGGCAAGAG |
| | | ASINYADRLARGHSL* (SEQ ID | GAACACCATCTGGCTGTTTGGGCCTGCA |
| | | NO: 336) | ACTACCGGGAAGACCAACATCGCGGAGG |
| | | | CCATAGCCCACACTGTGCCCTTCTACGG |
| | | | GTGCGTAAACTGGACCAATGAGAACTTT |
| | | | CCCTTCAACGACTGTGTCGACAAGATGG |
| | | | TGATCTGGTGGGAGGAGGGGAAGATGAC |
| | | | CGCCAAGGTCGTGGAGTCGGCCAAAGCC |
| | | | ATTCTCGGAGGAAGCAAGGTGCGCGTGG |
| | | | ACCAGAAATGCAAGTCCTCGGCCCAGAT |
| | | | AGACCCGACTCCCGTGATCGTCACCTCC |
| | | | AACACCAACATGTGCGCCGTGATTGACG |
| | | | GGAACTCAACGACCTTCGAACACCAGCA |
| | | | GCCGTTGCAAGACCGGATGTTCAAATTT |
| | | | GAACTCACCCGCCGTCTGGATCATGACT |
| | | | TTGGGAAGGTCACCAAGCAGGAAGTCAA |
| | | | AGACTTTTTCCGGTGGGCAAAGGATCAC |
| | | | GTGGTTGAGGTGGAGCATGAATTCTACG |
| | | | TCAAAAAGGGTGGAGCCAAGAAAAGACC |
| | | | CGCCCCCAGTGACGCAGATATAAGTGAG |
| | | | CCCAAACGGGTGCGCGAGTCAGTTGCGC |
| | | | AGCCATCGACGTCAGACGCGGAAGCTTC |
| | | | GATCAACTACGCAGACAGGTACCAAAAC |
| | | | AAATGTTCTCGTCACGTGGGCATGAATC |
| | | | TGATGCTGTTTCCCTGCAGACAATGCGA |
| | | | GAGAATGAATCAGAATTCAAATATCTGC |
| | | | TTCACTCACGGACAGAAAGACTGTTTAG |
| | | | AGTGCTTTCCCGTGTCAGAATCTCAACC |
| | | | CGTTTCTGTCGTCAAAAAGGCGTATCAG |
| | | | AAACTGTGCTACATTCATCATATCATGG |
| | | | GAAAGGTGCCAGACGCTTGCACTGCCTG |
| | | | CGATCTGGTCAATGTGGATTTGGATGAC |
| | | | TGCATCTTTGAACAATAAATGATTTAAA |
| | | | TCAGGTATGGCTGCCGATGGTTATCTTC |
| | | | CAGATTGGCTCGAGGACACTCTCTCTGA |
| | | | (SEQ ID NO: 340) |

[0295] Additional exemplary AAV2 wildtype sequences are provided in Table 4.

[0296] Table 4

| Name | Description | Amino acid sequence | Nucleotide sequence |
|---|---|---|---|
| AAV2 | The full | MAADGYLPDWLEDTLSEGIRQWWKLKP | ATGGCTGCCGATGGTTATCTTCCAGATT |
| VP1 | wild type | GPPPPKPAERHKDDSRGLVLPGYKYLG | GGCTCGAGGACACTCTCTCTGAAGGAAT |
| | sequence of | PFNGLDKGEPVNEADAAALEHDKAYDR | AAGACAGTGGTGGAAGCTCAAACCTGGC |
| | AAV2 VP1 | QLDSGDNPYLKYNHADAEFQERLKEDT | CCACCACCACCAAAGCCCGCAGAGCGGC |
| | | SFGGNLGRAVFQAKKRVLEPLGLVEEP | ATAAGGACGACAGCAGGGGTCTTGTGCT |
| | | VKTAPGKKRPVEHSPVEPDSSSGTGKA | TCCTGGGTACAAGTACCTCGGACCCTTC |
| | | GQQPARKRLNFGQTGDADSVPDPQPLG | AACGGACTCGACAAGGGAGAGCCGGTCA |
| | | QPPAAPSGLGTNTMATGSGAPMADNNE | ACGAGGCAGACGCCGCGGCCCTCGAGCA |
| | | GADGVGNSSGNWHCDSTWMGDRVITTS | CGACAAAGCCTACGACCGGCAGCTCGAC |
| | | TRTWALPTYNNHLYKQISSQSGASNDN | AGCGGAGACAACCCGTACCTCAAGTACA |
| | | HYFGYSTPWGYFDFNRFHCHFSPRDWQ | ACCACGCCGACGCGGAGTTTCAGGAGCG |
| | | RLINNNWGFRPKRLNFKLFNIQVKEVT | CCTTAAAGAAGATACGTCTTTTGGGGGC |
| | | QNDGTTTIANNLTSTVQVFTDSEYQLP | AACCTCGGACGAGCAGTCTTCCAGGCGA |
| | | YVLGSAHQGCLPPFPADVFMVPQYGYL | AAAAGAGGGTTCTTGAACCTCTGGGCCT |
| | | TLNNGSQAVGRSSFYCLEYFPSQMLRT | GGTTGAGGAACCTGTTAAGACGGCTCCG |
| | | GNNFTFSYTFEDVPFHSSYAHSQSLDR | GGAAAAAAGAGGCCGGTAGAGCACTCTC |
| | | LMNPLIDQYLYYLSRINTPSGTTTQSR | CTGTGGAGCCAGACTCCTCCTCGGGAAC |
| | | LQFSQAGASDIRDQSRNWLPGPCYRQQ | CGGAAAGGCGGGCCAGCAGCCTGCAAGA |
| | | RVSKTSADNNNSEYSWTGATKYHLNGR | AAAAGATTGAATTTTGGTCAGACTGGAG |
| | | DSLVNPGPAMASHKDDEEKFFPQSGVL | ACGCAGACTCAGTACCTGACCCCCAGCC |
| | | IFGKQGSEKTNVDIEKVMITDEEEIRT | TCTCGGACAGCCACCAGCAGCCCCCTCT |
| | | TNPVATEQYGSVSTNLQRGNRQAATAD | GGTCTGGGAACTAATACGATGGCTACAG |
| | | VNTQGVLPGMVWQDRDVYLQGPIWAKI | GCAGTGGCGCACCAATGGCAGACAATAA |
| | | PHTDGHFHPSPLMGGFGLKHPPPQILI | CGAGGGCGCCGACGGAGTGGGTAATTCC |
| | | KNTPVPANPSTTFSAAKFASFITQYST | TCGGGAAATTGGCATTGCGATTCCACAT |
| | | GQVSVEIEWELQKENSKRWNPEIQYTS | GGATGGGCGACAGAGTCATCACCACCAG |
| | | NYNKSVNVDFTVDINGVYSEPRPIGTR | CACCCGAACCTGGGCCCTGCCCACCTAC |
| | | YLTRNL* (SEQ ID NO: 341) | AACAACCACCTCTACAAACAAATTTCCA |
| | | | GCCAATCAGGAGCCTCGAACGACAATCA |
| | | | CTACTTTGGCTACAGCACCCCTTGGGGG |
| | | | TATTTTGACTTCAACAGATTCCACTGCC |
| | | | ACTTTTCACCACGTGACTGGCAAAGACT |
| | | | CATCAACAACAACTGGGGATTCCGACCC |
| | | | AAGAGACTCAACTTCAAGCTCTTTAACA |
| | | | TTCAAGTCAAAGAGGTCACGCAGAATGA |
| | | | CGGTACGACGACGATTGCCAATAACCTT |
| | | | ACCAGCACGGTTCAGGTGTTTACTGACT |
| | | | CGGAGTACCAGCTCCCGTACGTCCTCGG |
| | | | CTCGGCGCATCAAGGATGCCTCCCGCCG |
| | | | TTCCCAGCAGACGTCTTCATGGTGCCAC |
| | | | AGTATGGATACCTCACCCTGAACAACGG |
| | | | GAGTCAGGCAGTAGGACGCTCTTCATTT |
| | | | TACTGCCTGGAGTACTTTCCTTCTCAGA |
| | | | TGCTGCGTACCGGAAACAACTTTACCTT |
| | | | CAGCTACACTTTTGAGGACGTTCCTTTC |
| | | | CACAGCAGCTACGCTCACAGCCAGAGTC |
| | | | TGGACCGTCTCATGAATCCTCTCATCGA |
| | | | CCAGTACCTGTATTACTTGAGCAGAACA |
| | | | AACACTCCAAGTGGAACCACCACGCAGT |
| | | | CAAGGCTTCAGTTTTCTCAGGCCGGAGC |
| | | | GAGTGACATTCGGGACCAGTCTAGGAAC |
| | | | TGGCTTCCTGGACCCTGTTACCGCCAGC |
| | | | AGCGAGTATCAAAGACATCTGCGGATAA |
| | | | CAACAACAGTGAATACTCGTGGACTGGA |
| | | | GCTACCAAGTACCACCTCAATGGCAGAG |
| | | | ACTCTCTGGTGAATCCGGGCCCGGCCAT |
| | | | GGCAAGCCACAAGGACGATGAAGAAAAG |
| | | | TTTTTTCCTCAGAGCGGGGTTCTCATCT |
| | | | TTGGGAAGCAAGGCTCAGAGAAAACAAA |
| | | | TGTGGACATTGAAAAGGTCATGATTACA |
| | | | GACGAAGAGGAAATCAGGACAACCAATC |
| | | | CCGTGGCTACGGAGCAGTATGGTTCTGT |
| | | | ATCTACCAACCTCCAGAGAGGCAACAGA |
| | | | CAAGCAGCTACCGCAGATGTCAACACAC |
| | | | AAGGCGTTCTTCCAGGCATGGTCTGGCA |
| | | | GGACAGAGATGTGTACCTTCAGGGGCCC |
| | | | ATCTGGGCAAAGATTCCACACACGGACG |
| | | | GACATTTTCACCCCTCTCCCCTCATGGG |
| | | | TGGATTCGGACTTAAACACCCTCCTCCA |
| | | | CAGATTCTCATCAAGAACACCCCGGTAC |
| | | | CTGCGAATCCTTCGACCACCTTCAGTGC |
| | | | GGCAAAGTTTGCTTCCTTCATCACACAG |
| | | | TACTCCACGGGACAGGTCAGCGTGGAGA |
| | | | TCGAGTGGGAGCTGCAGAAGGAAAACAG |
| | | | CAAACGCTGGAATCCCGAAATTCAGTAC |
| | | | ACTTCCAACTACAACAAGTCTGTTAATG |
| | | | TGGACTTTACTGTGGACACTAATGGCGT |
| | | | GTATTCAGAGCCTCGCCCCATTGGCACC |
| | | | AGATACCTGACTCGTAATCTGTAA |
| | | | (SEQ ID NO: 346) |
| AAV2 | The full | TAPGKKRPVEHSPVEPDSSSGTGKAGQ | ACGGCTCCGGGAAAAAAGAGGCCGGTAG |
| VP2 | wild type | QPARKRLNFGQTGDADSVPDPQPLGQP | AGCACTCTCCTGTGGAGCCAGACTCCTC |
| | sequence of | PAAPSGLGTNTMATGSGAPMADNNEGA | CTCGGGAACCGGAAAGGCGGGCCAGCAG |
| | AAV2 VP2 | DGVGNSSGNWHCDSTWMGDRVITTSTR | CCTGCAAGAAAAAGATTGAATTTTGGTC |
| | | TWALPTYNNHLYKQISSQSGASNDNHY | AGACTGGAGACGCAGACTCAGTACCTGA |
| | | FGYSTPWGYFDFNRFHCHFSPRDWQRL | CCCCCAGCCTCTCGGACAGCCACCAGCA |
| | | INNNWGFRPKRLNFKLFNIQVKEVTQN | GCCCCCTCTGGTCTGGGAACTAATACGA |
| | | DGTTTIANNLTSTVQVFTDSEYQLPYV | TGGCTACAGGCAGTGGCGCACCAATGGC |
| | | LGSAHQGCLPPFPADVFMVPQYGYLTL | AGACAATAACGAGGGCGCCGACGGAGTG |
| | | NNGSQAVGRSSFYCLEYFPSQMLRTGN | GGTAATTCCTCGGGAAATTGGCATTGCG |
| | | NFTFSYTFEDVPFHSSYAHSQSLDRLM | ATTCCACATGGATGGGCGACAGAGTCAT |
| | | NPLIDQYLYYLSRINTPSGTTTQSRLQ | CACCACCAGCACCCGAACCTGGGCCCTG |
| | | FSQAGASDIRDQSRNWLPGPCYRQQRV | CCCACCTACAACAACCACCTCTACAAAC |
| | | SKTSADNNNSEYSWTGATKYHLNGRDS | AAATTTCCAGCCAATCAGGAGCCTCGAA |
| | | LVNPGPAMASHKDDEEKFFPQSGVLIF | CGACAATCACTACTTTGGCTACAGCACC |
| | | GKQGSEKTNVDIEKVMITDEEEIRTTN | CCTTGGGGGTATTTTGACTTCAACAGAT |
| | | PVATEQYGSVSTNLQRGNRQAATADVN | TCCACTGCCACTTTTCACCACGTGACTG |
| | | TQGVLPGMVWQDRDVYLQGPIWAKIPH | GCAAAGACTCATCAACAACAACTGGGGA |
| | | TDGHFHPSPLMGGFGLKHPPPQILIKN | TTCCGACCCAAGAGACTCAACTTCAAGC |
| | | TPVPANPSTTFSAAKFASFITQYSTGQ | TCTTTAACATTCAAGTCAAAGAGGTCAC |
| | | VSVEIEWELQKENSKRWNPEIQYTSNY | GCAGAATGACGGTACGACGACGATTGCC |
| | | NKSVNVDFTVDINGVYSEPRPIGTRYL | AATAACCTTACCAGCACGGTTCAGGTGT |
| | | TRNL* (SEQ ID NO: 342) | TTACTGACTCGGAGTACCAGCTCCCGTA |
| | | | CGTCCTCGGCTCGGCGCATCAAGGATGC |
| | | | CTCCCGCCGTTCCCAGCAGACGTCTTCA |
| | | | TGGTGCCACAGTATGGATACCTCACCCT |
| | | | GAACAACGGGAGTCAGGCAGTAGGACGC |
| | | | TCTTCATTTTACTGCCTGGAGTACTTTC |
| | | | CTTCTCAGATGCTGCGTACCGGAAACAA |
| | | | CTTTACCTTCAGCTACACTTTTGAGGAC |
| | | | GTTCCTTTCCACAGCAGCTACGCTCACA |
| | | | GCCAGAGTCTGGACCGTCTCATGAATCC |
| | | | TCTCATCGACCAGTACCTGTATTACTTG |
| | | | AGCAGAACAAACACTCCAAGTGGAACCA |
| | | | CCACGCAGTCAAGGCTTCAGTTTTCTCA |
| | | | GGCCGGAGCGAGTGACATTCGGGACCAG |
| | | | TCTAGGAACTGGCTTCCTGGACCCTGTT |
| | | | ACCGCCAGCAGCGAGTATCAAAGACATC |
| | | | TGCGGATAACAACAACAGTGAATACTCG |
| | | | TGGACTGGAGCTACCAAGTACCACCTCA |
| | | | ATGGCAGAGACTCTCTGGTGAATCCGGG |
| | | | CCCGGCCATGGCAAGCCACAAGGACGAT |
| | | | GAAGAAAAGTTTTTTCCTCAGAGCGGGG |
| | | | TTCTCATCTTTGGGAAGCAAGGCTCAGA |
| | | | GAAAACAAATGTGGACATTGAAAAGGTC |
| | | | ATGATTACAGACGAAGAGGAAATCAGGA |
| | | | CAACCAATCCCGTGGCTACGGAGCAGTA |
| | | | TGGTTCTGTATCTACCAACCTCCAGAGA |
| | | | GGCAACAGACAAGCAGCTACCGCAGATG |
| | | | TCAACACACAAGGCGTTCTTCCAGGCAT |
| | | | GGTCTGGCAGGACAGAGATGTGTACCTT |
| | | | CAGGGGCCCATCTGGGCAAAGATTCCAC |
| | | | ACACGGACGGACATTTTCACCCCTCTCC |
| | | | CCTCATGGGTGGATTCGGACTTAAACAC |
| | | | CCTCCTCCACAGATTCTCATCAAGAACA |
| | | | CCCCGGTACCTGCGAATCCTTCGACCAC |
| | | | CTTCAGTGCGGCAAAGTTTGCTTCCTTC |
| | | | ATCACACAGTACTCCACGGGACAGGTCA |
| | | | GCGTGGAGATCGAGTGGGAGCTGCAGAA |
| | | | GGAAAACAGCAAACGCTGGAATCCCGAA |
| | | | ATTCAGTACACTTCCAACTACAACAAGT |
| | | | CTGTTAATGTGGACTTTACTGTGGACAC |
| | | | TAATGGCGTGTATTCAGAGCCTCGCCCC |
| | | | ATTGGCACCAGATACCTGACTCGTAATC |
| | | | TGTAA (SEQ ID NO: 347) |
| AAV2 | The wild | MATGSGAPMADNNEGADGVGNSSGNWH | ATGGCTACAGGCAGTGGCGCACCAATGG |
| VP3 | type | CDSTWMGDRVITTSTRIWALPTYNNHL | CAGACAATAACGAGGGCGCCGACGGAGT |
| | sequence of | YKQISSQSGASNDNHYFGYSTPWGYFD | GGGTAATTCCTCGGGAAATTGGCATTGC |
| | AAV2 VP3 | FNRFHCHFSPRDWQRLINNNWGFRPKR | GATTCCACATGGATGGGCGACAGAGTCA |
| | | LNFKLFNIQVKEVTQNDGTTTIANNLT | TCACCACCAGCACCCGAACCTGGGCCCT |
| | | STVQVFTDSEYQLPYVLGSAHQGCLPP | GCCCACCTACAACAACCACCTCTACAAA |
| | | FPADVFMVPQYGYLTLNNGSQAVGRSS | CAAATTTCCAGCCAATCAGGAGCCTCGA |
| | | FYCLEYFPSQMLRTGNNFTFSYTFEDV | ACGACAATCACTACTTTGGCTACAGCAC |
| | | PFHSSYAHSQSLDRLMNPLIDQYLYYL | CCCTTGGGGGTATTTTGACTTCAACAGA |
| | | SRINTPSGTTTQSRLQFSQAGASDIRD | TTCCACTGCCACTTTTCACCACGTGACT |
| | | QSRNWLPGPCYRQQRVSKTSADNNNSE | GGCAAAGACTCATCAACAACAACTGGGG |
| | | YSWTGATKYHLNGRDSLVNPGPAMASH | ATTCCGACCCAAGAGACTCAACTTCAAG |
| | | KDDEEKFFPQSGVLIFGKQGSEKTNVD | CTCTTTAACATTCAAGTCAAAGAGGTCA |
| | | IEKVMITDEEEIRTTNPVATEQYGSVS | CGCAGAATGACGGTACGACGACGATTGC |
| | | TNLQRGNRQAATADVNTQGVLPGMVWQ | CAATAACCTTACCAGCACGGTTCAGGTG |
| | | DRDVYLQGPIWAKIPHTDGHFHPSPLM | TTTACTGACTCGGAGTACCAGCTCCCGT |
| | | GGFGLKHPPPQILIKNTPVPANPSTTF | ACGTCCTCGGCTCGGCGCATCAAGGATG |
| | | SAAKFASFITQYSTGQVSVEIEWELQK | CCTCCCGCCGTTCCCAGCAGACGTCTTC |
| | | ENSKRWNPEIQYTSNYNKSVNVDFTVD | ATGGTGCCACAGTATGGATACCTCACCC |
| | | TNGVYSEPRPIGTRYLTRNL* (SEQ | TGAACAACGGGAGTCAGGCAGTAGGACG |
| | | ID NO: 343) | CTCTTCATTTTACTGCCTGGAGTACTTT |
| | | | CCTTCTCAGATGCTGCGTACCGGAAACA |
| | | | ACTTTACCTTCAGCTACACTTTTGAGGA |
| | | | CGTTCCTTTCCACAGCAGCTACGCTCAC |
| | | | AGCCAGAGTCTGGACCGTCTCATGAATC |
| | | | CTCTCATCGACCAGTACCTGTATTACTT |
| | | | GAGCAGAACAAACACTCCAAGTGGAACC |
| | | | ACCACGCAGTCAAGGCTTCAGTTTTCTC |
| | | | AGGCCGGAGCGAGTGACATTCGGGACCA |
| | | | GTCTAGGAACTGGCTTCCTGGACCCTGT |
| | | | TACCGCCAGCAGCGAGTATCAAAGACAT |
| | | | CTGCGGATAACAACAACAGTGAATACTC |
| | | | GTGGACTGGAGCTACCAAGTACCACCTC |
| | | | AATGGCAGAGACTCTCTGGTGAATCCGG |
| | | | GCCCGGCCATGGCAAGCCACAAGGACGA |
| | | | TGAAGAAAAGTTTTTTCCTCAGAGCGGG |
| | | | GTTCTCATCTTTGGGAAGCAAGGCTCAG |
| | | | AGAAAACAAATGTGGACATTGAAAAGGT |
| | | | CATGATTACAGACGAAGAGGAAATCAGG |
| | | | ACAACCAATCCCGTGGCTACGGAGCAGT |
| | | | ATGGTTCTGTATCTACCAACCTCCAGAG |
| | | | AGGCAACAGACAAGCAGCTACCGCAGAT |
| | | | GTCAACACACAAGGCGTTCTTCCAGGCA |
| | | | TGGTCTGGCAGGACAGAGATGTGTACCT |
| | | | TCAGGGGCCCATCTGGGCAAAGATTCCA |
| | | | CACACGGACGGACATTTTCACCCCTCTC |
| | | | CCCTCATGGGTGGATTCGGACTTAAACA |
| | | | CCCTCCTCCACAGATTCTCATCAAGAAC |
| | | | ACCCCGGTACCTGCGAATCCTTCGACCA |
| | | | CCTTCAGTGCGGCAAAGTTTGCTTCCTT |
| | | | CATCACACAGTACTCCACGGGACAGGTC |
| | | | AGCGTGGAGATCGAGTGGGAGCTGCAGA |
| | | | AGGAAAACAGCAAACGCTGGAATCCCGA |
| | | | AATTCAGTACACTTCCAACTACAACAAG |
| | | | TCTGTTAATGTGGACTTTACTGTGGACA |
| | | | CTAATGGCGTGTATTCAGAGCCTCGCCC |
| | | | CATTGGCACCAGATACCTGACTCGTAAT |
| | | | CTGTAA (SEQ ID NO: 348) |
| AAV2 | The | LAHHHQSPQSGIRTTAGVLCFLGTSTS | CTGGCCCACCACCACCAAAGCCCGCAGA |
| MAAP | sequence of | DPSTDSTRESRSTRQTPRPSSTTKPTT | GCGGCATAAGGACGACAGCAGGGGTCTT |
| | MAAP in | GSSTAETTRISSTTTPTRSFRSALKKI | GTGCTTCCTGGGTACAAGTACCTCGGAC |
| | AAV2 for | RLLGATSDEQSSRRKRGFLNLWAWLRN | CCTTCAACGGACTCGACAAGGGAGAGCC |
| | reference | LLRRLREKRGR* (SEQ ID NO: | GGTCAACGAGGCAGACGCCGCGGCCCTC |
| | | 344) | GAGCACGACAAAGCCTACGACCGGCAGC |
| | | | TCGACAGCGGAGACAACCCGTACCTCAA |
| | | | GTACAACCACGCCGACGCGGAGTTTCAG |
| | | | GAGCGCCTTAAAGAAGATACGTCTTTTG |
| | | | GGGGCAACCTCGGACGAGCAGTCTTCCA |
| | | | GGCGAAAAAGAGGGTTCTTGAACCTCTG |
| | | | GGCCTGGTTGAGGAACCTGTTAAGACGG |
| | | | CTCCGGGAAAAAAGAGGCCGGTAG |
| | | | (SEQ ID NO: 349) |
| AAV2 | The | LETQTQYLTPSLSDSHQQPPLVWELIR | CTGGAGACGCAGACTCAGTACCTGACCC |
| AAP | sequence of | WLQAVAHQWQTITRAPTEWVIPREIGI | CCAGCCTCTCGGACAGCCACCAGCAGCC |
| | AAP in | AIPHGWATESSPPAPEPGPCPPTTTTS | CCCTCTGGTCTGGGAACTAATACGATGG |
| | AAV2 for | TNKFPANQEPRTTITTLATAPLGGILT | CTACAGGCAGTGGCGCACCAATGGCAGA |
| | reference | STDSTATFHHVTGKDSSTTTGDSDPRD | CAATAACGAGGGCGCCGACGGAGTGGGT |
| | | STSSSLTFKSKRSRRMTVRRRLPITLP | AATTCCTCGGGAAATTGGCATTGCGATT |
| | | ARFRCLLTRSTSSRTSSARRIKDASRR | CCACATGGATGGGCGACAGAGTCATCAC |
| | | SQQTSSWCHSMDTSP* (SEQ ID | CACCAGCACCCGAACCTGGGCCCTGCCC |
| | | NO: 345) | ACCTACAACAACCACCTCTACAAACAAA |
| | | | TTTCCAGCCAATCAGGAGCCTCGAACGA |
| | | | CAATCACTACTTTGGCTACAGCACCCCT |
| | | | TGGGGGTATTTTGACTTCAACAGATTCC |
| | | | ACTGCCACTTTTCACCACGTGACTGGCA |
| | | | AAGACTCATCAACAACAACTGGGGATTC |
| | | | CGACCCAAGAGACTCAACTTCAAGCTCT |
| | | | TTAACATTCAAGTCAAAGAGGTCACGCA |
| | | | GAATGACGGTACGACGACGATTGCCAAT |
| | | | AACCTTACCAGCACGGTTCAGGTGTTTA |
| | | | CTGACTCGGAGTACCAGCTCCCGTACGT |
| | | | CCTCGGCTCGGCGCATCAAGGATGCCTC |
| | | | CCGCCGTTCCCAGCAGACGTCTTCATGG |
| | | | TGCCACAGTATGGATACCTCACCCTGA |
| | | | (SEQ ID NO: 350) |

[0297] In some embodiments, a nucleic acid of the disclosure (e.g., comprising an ORF encoding MAAP comprising an exogenous start codon, or comprising a payload, e.g., a transgene) comprises conventional control elements or sequences which are operably linked to the ORF encoding MAAP or to the payload, e.g., transgene, in a manner which permits transcription, translation and/or expression in a cell transfected with the nucleic acid (e.g., a plasmid vector comprising said nucleic acid) or infected with a virus comprising said nucleic acid. As used herein, “operably linked” sequences include both expression control sequences that are contiguous with the gene of interest and expression control sequences that act in trans or at a distance to control the gene of interest.

[0298] Expression control sequences include efficient RNA processing signals such as splicing and polyadenylation (polyA) signals; appropriate transcription initiation, termination, promoter and enhancer sequences; sequences that stabilize cytoplasmic mRNA; sequences that enhance protein stability; sequences that enhance translation efficiency (e.g., Kozak consensus sequence); and in some embodiments, sequences that enhance secretion of the encoded transgene product. Expression control sequences, including promoters which are native, constitutive, inducible and/or tissue-specific, are known in the art and may be utilized with the compositions and methods disclosed herein.

[0299] In some embodiments, the native promoter for the transgene may be used. Without wishing to be bound by theory, the native promoter may mimic native expression of the transgene, or provide temporal, developmental, or tissue-specific expression, or expression in response to specific transcriptional stimuli. In some embodiment, the transgene may be operably linked to other native expression control elements, such as enhancer elements, polyadenylation sites or Kozak consensus sequences, e.g., to mimic the native expression.

[0300] In some embodiments, the transgene is operably linked to a tissue-specific promoter.

[0301] In some embodiments, a vector, e.g., a plasmid, carrying a transgene may also include a selectable marker or a reporter gene. Such selectable reporters or marker genes can be used to signal the presence of the vector, e.g., plasmid, in bacterial cells. Other components of the vector, e.g., plasmid, may include an origin of replication. Selection of these and other promoters and vector elements are conventional and many such sequences are available [see, e.g., Sambrook et al, and references cited therein].

### MAAP Polypeptides

[0302] The disclosure is directed, in part, to a MAAP polypeptide encoded by a nucleic acid described herein (e.g., a nucleic acid comprising an ORF encoding a functional MAAP polypeptide comprising an exogenous start codon), and to a MAAP polypeptide comprising a mutation corresponding to the presence of an exogenous start codon in the nucleic acid encoding said MAAP polypeptide.

[0303] In some embodiments, the exogenous start codon is an ATG. In some embodiments, a MAAP polypeptide comprises an amino acid corresponding to the exogenous start codon (e.g., the first amino acid of the MAAP polypeptide). In some embodiments, the amino acid is a methionine.

[0304] In some embodiments, the exogenous start codon is a CTG. In some embodiments, a MAAP polypeptide comprises an amino acid corresponding to the exogenous start codon (e.g., the first amino acid of the MAAP polypeptide). In some embodiments, the amino acid is a leucine.

[0305] In some embodiments, a MAAP polypeptide (e.g., encoded by an ORF of a nucleic acid described herein) is a functional MAAP polypeptide. In some embodiments, the presence of the MAAP polypeptide in a cell, cell-free system, or translation system improves (e.g., increases) a production characteristic of the cell, cell-free system, or translation system, dependoparvovirus particle produced by the cell, cell-free system, or translation system, and/or a method of making the dependoparvovirus particle using the cell, cell-free system, or translation system.

[0306] In some embodiments, a MAAP polypeptide is an isolated or purified polypeptide (e.g., isolated or purified from a cell, other biological component, or contaminant). In some embodiments, a MAAP polypeptide is present in a dependoparvovirus particle, e.g., described herein. In some embodiments, a MAAP polypeptide is present in a cell, cell-free system, or translation system, e.g., described herein.

[0307] In some embodiments, the MAAP polypeptide is a dependoparvovirus B (e.g., AAV5) MAAP polypeptide. In some embodiments, the MAAP polypeptide is a functional MAAP polypeptide. MAAP polypeptides may comprise one or more structural regions. In some embodiments, a MAAP polypeptide comprises one, two, three, four, five, or all of: an N-terminal disordered region; a short hydrophobic region comprising a beta-strand; a T/S rich disordered region; a region devoid of predicted secondary structure; a disordered region; or a C-terminal amphipathic region comprising an alpha-helix. In some embodiments, a MAAP polypeptide comprises, from most N-terminal to most C-terminal, one, two, three, four, five, or all of the following domains: an N-terminal disordered region; a short hydrophobic region comprising a beta-strand; a T/S rich disordered region; a region devoid of predicted secondary structure; a disordered region; or a C-terminal amphipathic region comprising an alpha-helix. In some embodiments, a MAAP polypeptide comprises, from most N-terminal to most C-terminal: an N-terminal disordered region; a short hydrophobic region comprising a beta-strand; a T/S rich disordered region; a region devoid of predicted secondary structure; a disordered region; and a C-terminal amphipathic region comprising an alpha-helix.

[0308] In some embodiments, the N-terminal disordered region is capable of binding to a polypeptide. In some embodiments, the short hydrophobic region comprising a beta-strand is capable of binding to a polypeptide. In some embodiments, the T/S rich disordered region is enriched in charged amino acids. In some embodiments, the region devoid of predicted secondary structure is capable of binding to a polypeptide. In some embodiments, the disordered region is capable of forming an alpha helix. In some embodiments, the C-terminal amphipathic region comprising an alpha-helix is capable of binding a membrane.

[0309] In some embodiments, a MAAP polypeptide comprises a full length MAAP, e.g., the MAAP polypeptide is not missing a region or amino acids present in a reference MAAP (e.g., a naturally occurring MAAP) or a region or amino acids corresponding to those positions of a reference MAAP. In some embodiments, a MAAP polypeptide comprises a truncation and/or deletion relative to a reference MAAP, e.g., is missing a region or amino acids present in a reference MAAP (e.g., a naturally occurring MAAP) or a region or amino acids corresponding to those positions of a reference MAAP. In some embodiments, a MAAP polypeptide comprises at least 80, 85, 90, 95, 100, 105, 110, 115, or 116 amino acids (e.g., a full length MAAP) and optionally no more than 120, 119, 118, 117, 116, 115, 110, 105, or 100 amino acids.

[0310] In some embodiments, the MAAP polypeptide comprises an alteration relative to a reference sequence. In some embodiments, the reference sequence is a naturally occurring dependoparvovirus B MAAP, e.g., a naturally occurring AAV5 MAAP. In some embodiments, the reference sequence is a mutant, artificial, or synthetic MAAP known in the art. In some embodiments, the reference sequence comprises a wildtype sequence, e.g., SEQ ID NO: 325, or a sequence with at least 90, 91, 92, 93, 94, 95, 96, 97, 98, or 99% sequence identity with a wildtype sequence, e.g., SEQ ID NO: 325. In some embodiments, the reference sequences comprises a subset (e.g., a truncation) of a wildtype sequence, e.g., wherein the position of the exogenous start codon results in a truncated MAAP polypeptide relative to the putative ORF encoding MAAP. In some embodiments, the alteration comprises substitution, deletion, or insertion of one or more amino acids, or a combination of a substitution, deletion, or insertion. In some embodiments, a MAAP polypeptide comprises an alteration specified by the CIGAR string of column 8 of Table 1 relative to AAV5 MAAP, or at a corresponding position in another dependoparvovirus MAAP, e.g., resulting from the presence of an exogenous start codon in the nucleic acid sequence encoding the MAAP polypeptide. In some embodiments, a MAAP polypeptide comprises one or more additional amino acids at the N- and/or C-termini, e.g., relative to a reference MAAP polypeptide.

[0311] In some embodiments, the MAAP polypeptide comprises an amino acid sequence that has at least 80, 85, 90, 91, 92, 93, 94, 95, 96, 97, 98, 99, or 100% identity to the amino acid sequence of a wildtype dependoparvovirus B MAAP polypeptide (e.g., SEQ ID NO: 325). In some embodiments, the MAAP polypeptide comprises an amino acid sequence that differs by no more than 30, 29, 28, 27, 26, 25, 24, 23, 22, 21, 20, 19, 18, 17, 16, 15, 14, 13, 12, 11, 10, 9, 8, 7, 6, 5, 4, 3, 2, or 1 amino acids from the amino acid sequence of a wildtype dependoparvovirus B MAAP polypeptide (e.g., SEQ ID NO: 325). In some embodiments, the MAAP polypeptide is an AAV5 MAAP polypeptide. In some embodiments, the MAAP polypeptide comprises an amino acid sequence that has at least 80, 85, 90, 91, 92, 93, 94, 95, 96, 97, 98, 99, or 100% identity to the amino acid sequence of a wildtype AAV5 MAAP polypeptide (e.g., SEQ ID NO: 325). In some embodiments, the MAAP polypeptide comprises an amino acid sequence that differs by no more than 30, 29, 28, 27, 26, 25, 24, 23, 22, 21, 20, 19, 18, 17, 16, 15, 14, 13, 12, 11, 10, 9, 8, 7, 6, 5, 4, 3, 2, or 1 amino acids from the amino acid sequence of a wildtype AAV5 MAAP polypeptide (e.g., SEQ ID NO: 325). In some embodiments, the MAAP polypeptide differs by 1-30, 5-30, 10-30, 15-30, 20-30, 25-30, 1-25, 5-25, 10-25, 15-25, 20-25, 1-20, 5-20, 10-20, 15-20, 1-15, 5-15, 10-15, 1-10, 5-10, or 1-5 amino acids from the amino acid sequence of a wildtype AAV5 MAAP polypeptide (e.g., SEQ ID NO: 325).

[0312] In some embodiments, the MAAP polypeptide comprises an amino acid sequence that has at least 80, 85, 90, 91, 92, 93, 94, 95, 96, 97, 98, 99, or 100% identity to an amino acid sequence of Table 2, e.g., SEQ ID NOs: 3, 7, 11, 15, 19, 23, 27, 31, 35, 39, 43, 47, 51, 55, 59, 63, 67, 71, 75, 79, 83, 87, 91, 95, 99, 103, 107, 111, 115, 119, 123, 127, 131, 135, 139, 143, 147, 151, 155, 159, 163, 167, 171, 175, 179, 183, 187, 191, 195, 199, 203, 207, 211, 215, 219, 223, 227, 231, 235, 239, 243, 247, 251, 255, 259, 263, 267, 271, 275, 279, 283, 287, 291, 295, 299, 303, 307, 311, 315, or 319. In some embodiments, the MAAP polypeptide comprises an amino acid sequence that differs by no more than 30, 29, 28, 27, 26, 25, 24, 23, 22, 21, 20, 19, 18, 17, 16, 15, 14, 13, 12, 11, 10, 9, 8, 7, 6, 5, 4, 3, 2, or 1 amino acids from an amino acid sequence of Table 2, e.g., SEQ ID NOs: 3, 7, 11, 15, 19, 23, 27, 31, 35, 39, 43, 47, 51, 55, 59, 63, 67, 71, 75, 79, 83, 87, 91, 95, 99, 103, 107, 111, 115, 119, 123, 127, 131, 135, 139, 143, 147, 151, 155, 159, 163, 167, 171, 175, 179, 183, 187, 191, 195, 199, 203, 207, 211, 215, 219, 223, 227, 231, 235, 239, 243, 247, 251, 255, 259, 263, 267, 271, 275, 279, 283, 287, 291, 295, 299, 303, 307, 311, 315, or 319.

[0313] In some embodiments, the MAAP polypeptide is a wildtype MAAP polypeptide (e.g., a wildtype dependoparvovirus B, e.g., an AAV5, MAAP polypeptide) at all other positions besides those affected by the exogenous start codon. In some embodiments, the MAAP polypeptide is a wildtype MAAP polypeptide (e.g., a wildtype dependoparvovirus B, e.g., an AAV5, MAAP polypeptide) at all other positions besides those affected by the exogenous start codon and a position that is altered (relative to a wildtype sequence, e.g., SEQ ID NO: 325) in any of SEQ ID NOs: 3, 7, 11, 15, 19, 23, 27, 31, 35, 39, 43, 47, 51, 55, 59, 63, 67, 71, 75, 79, 83, 87, 91, 95, 99, 103, 107, 111, 115, 119, 123, 127, 131, 135, 139, 143, 147, 151, 155, 159, 163, 167, 171, 175, 179, 183, 187, 191, 195, 199, 203, 207, 211, 215, 219, 223, 227, 231, 235, 239, 243, 247, 251, 255, 259, 263, 267, 271, 275, 279, 283, 287, 291, 295, 299, 303, 307, 311, 315, or 319. In some embodiments, a plurality of the positions altered in any of SEQ ID NOs: 3, 7, 11, 15, 19, 23, 27, 31, 35, 39, 43, 47, 51, 55, 59, 63, 67, 71, 75, 79, 83, 87, 91, 95, 99, 103, 107, 111, 115, 119, 123, 127, 131, 135, 139, 143, 147, 151, 155, 159, 163, 167, 171, 175, 179, 183, 187, 191, 195, 199, 203, 207, 211, 215, 219, 223, 227, 231, 235, 239, 243, 247, 251, 255, 259, 263, 267, 271, 275, 279, 283, 287, 291, 295, 299, 303, 307, 311, 315, or 319 relative to relative to a wildtype sequence, e.g., SEQ ID NO: 325, is altered in the amino acid sequence of the MAAP polypeptide. For example, the MAAP polypeptide may be a wildtype MAAP polypeptide (e.g., a wildtype dependoparvovirus B, e.g., an AAV5, MAAP polypeptide) at all other positions besides those affected by the exogenous start codon and the positions altered (relative to a wildtype sequence, e.g., SEQ ID NO: 325) in any two, three, four, five, six, seven, eight, nine, or ten of of SEQ ID NOs: 3, 7, 11, 15, 19, 23, 27, 31, 35, 39, 43, 47, 51, 55, 59, 63, 67, 71, 75, 79, 83, 87, 91, 95, 99, 103, 107, 111, 115, 119, 123, 127, 131, 135, 139, 143, 147, 151, 155, 159, 163, 167, 171, 175, 179, 183, 187, 191, 195, 199, 203, 207, 211, 215, 219, 223, 227, 231, 235, 239, 243, 247, 251, 255, 259, 263, 267, 271, 275, 279, 283, 287, 291, 295, 299, 303, 307, 311, 315, or 319.

[0314] In some embodiments, the MAAP polypeptide further comprises an additional alteration (e.g., a substitution, insertion, or deletion) relative to a wildtype sequence (e.g., SEQ ID NO: 325) in addition to any amino acid change resulting from the presence of the exogenous start codon in the ORF encoding MAAP and any alteration present relative to a wildtype sequence in SEQ ID NOs: 3, 7, 11, 15, 19, 23, 27, 31, 35, 39, 43, 47, 51, 55, 59, 63, 67, 71, 75, 79, 83, 87, 91, 95, 99, 103, 107, 111, 115, 119, 123, 127, 131, 135, 139, 143, 147, 151, 155, 159, 163, 167, 171, 175, 179, 183, 187, 191, 195, 199, 203, 207, 211, 215, 219, 223, 227, 231, 235, 239, 243, 247, 251, 255, 259, 263, 267, 271, 275, 279, 283, 287, 291, 295, 299, 303, 307, 311, 315, or 319. In some embodiments, the additional alteration improves a production characteristic of a dependoparvovirus particle or method of making the same. In some embodiments, the additional alteration improves or alters another characteristic of a dependoparvovirus particle, e.g., tropism.

### Other Polypeptides and Nucleic Acids

[0315] The disclosure is further directed, in part, to a nucleic acid comprising a sequence encoding an ORF for a functional MAAP polypeptide comprising an exogenous start codon that further comprises a sequence encoding one or more dependoparvovirus genes. In some embodiments, the nucleic acid comprising a sequence encoding an ORF for a functional MAAP polypeptide further comprises a dependoparvovirus gene. In some embodiments, the nucleic acid comprising a sequence encoding an ORF for a functional MAAP polypeptide further comprises a plurality of dependoparvovirus genes. In some embodiments, the nucleic acid, e.g., the plurality of dependoparvovirus genes, is sufficient to direct production of functional dependoparvovirus particles in a cell, e.g., a human cell, cell-free system, or other translation system (e.g., all of the genes in a dependoparvovirus genome). In some embodiments, the nucleic acid comprises one or more helper sequences.

[0316] In some embodiments, the one or more dependoparvovirus genes are of the same species (e.g., dependoparvovirus B) and/or serotype (e.g., AAV5) as the ORF encoding MAAP polypeptide. In some embodiments, the one or more dependoparvovirus genes have at least 80, 85, 90, 91, 92, 93, 94, 95, 96, 97, 98, 99, or 100% identity to the amino acid sequence of a corresponding dependoparvovirus gene of the same species (e.g., dependoparvovirus B) and/or serotype (e.g., AAV5) as the ORF encoding MAAP polypeptide, or differ by no more than 30, 29, 28, 27, 26, 25, 24, 23, 22, 21, 20, 19, 18, 17, 16, 15, 14, 13, 12, 11, 10, 9, 8, 7, 6, 5, 4, 3, 2, or 1 amino acids from a corresponding dependoparvovirus gene of the same species (e.g., dependoparvovirus B) and/or serotype (e.g., AAV5) as the ORF encoding MAAP polypeptide. In some embodiments, the one or more dependoparvovirus genes are of a different species (e.g., dependoparvovirus A) and/or serotype as the ORF encoding MAAP polypeptide. In some embodiments, the one or more dependoparvovirus genes are of AAV2 or AAV9. In some embodiments, the one or more dependoparvovirus genes have at least 80, 85, 90, 91, 92, 93, 94, 95, 96, 97, 98, 99, or 100% identity to the amino acid sequence of a corresponding dependoparvovirus gene of dependoparvovirus A and/or AAV2 or AAV9, or differ by no more than 30, 29, 28, 27, 26, 25, 24, 23, 22, 21, 20, 19, 18, 17, 16, 15, 14, 13, 12, 11, 10, 9, 8, 7, 6, 5, 4, 3, 2, or 1 amino acids from a corresponding dependoparvovirus gene of dependoparvovirus A and/or AAV2 or AAV9.

[0317] In some embodiments, the nucleic acid comprising a sequence encoding an ORF for a functional MAAP polypeptide comprising an exogenous start codon further comprises a Cap gene (e.g., a sequence encoding a Cap polypeptide) or a functional variant or portion thereof. In some embodiments, the Cap polypeptide has at least 80, 85, 90, 91, 92, 93, 94, 95, 96, 97, 98, 99, or 100% identity to the amino acid sequence of a wildtype dependoparvovirus A or B Cap polypeptide (e.g., an AAV2, AAV5, or AAV9 Cap polypeptide), e.g., SEQ ID NO: 321, or differs by no more than 30, 29, 28, 27, 26, 25, 24, 23, 22, 21, 20, 19, 18, 17, 16, 15, 14, 13, 12, 11, 10, 9, 8, 7, 6, 5, 4, 3, 2, or 1 amino acids from a wildtype dependoparvovirus A or B Cap polypeptide (e.g., an AAV2, AAV5, or AAV9 Cap polypeptide), e.g., SEQ ID NO: 321.

[0318] In some embodiments, the nucleic acid comprising a sequence encoding an ORF for a functional MAAP polypeptide comprising an exogenous start codon further comprises a Rep gene (e.g., a sequence encoding a Rep polypeptide) or a functional variant or portion thereof. In some embodiments, the Rep polypeptide has at least 80, 85, 90, 91, 92, 93, 94, 95, 96, 97, 98, 99, or 100% identity to the amino acid sequence of a wildtype dependoparvovirus A or B Rep polypeptide (e.g., an AAV2, AAV5, or AAV9 Rep polypeptide), e.g., any of SEQ ID NOs: 333-336, or differs by no more than 30, 29, 28, 27, 26, 25, 24, 23, 22, 21, 20, 19, 18, 17, 16, 15, 14, 13, 12, 11, 10, 9, 8, 7, 6, 5, 4, 3, 2, or 1 amino acids from a wildtype dependoparvovirus A or B Rep polypeptide (e.g., an AAV2, AAV5, or AAV9 Rep polypeptide), e.g., any of SEQ ID NOs: 333-336.

[0319] In some embodiments, the nucleic acid comprising a sequence encoding an ORF for a functional MAAP polypeptide comprising an exogenous start codon further comprises a sequence encoding a VP1 polypeptide or a functional variant or portion thereof. In some embodiments, the VP1 polypeptide has at least 80, 85, 90, 91, 92, 93, 94, 95, 96, 97, 98, 99, or 100% identity to the amino acid sequence of a wildtype dependoparvovirus A or B VP1 polypeptide (e.g., an AAV2, AAV5, or AAV9 VP1 polypeptide), e.g., SEQ ID NO: 321, or differs by no more than 30, 29, 28, 27, 26, 25, 24, 23, 22, 21, 20, 19, 18, 17, 16, 15, 14, 13, 12, 11, 10, 9, 8, 7, 6, 5, 4, 3, 2, or 1 amino acids from a wildtype dependoparvovirus A or B VP1 polypeptide (e.g., an AAV2, AAV5, or AAV9 VP1 polypeptide), e.g., SEQ ID NO: 321.

[0320] In some embodiments, the nucleic acid comprising a sequence encoding an ORF for a functional MAAP polypeptide comprising an exogenous start codon further comprises a sequence encoding VP2 polypeptide or a functional variant or portion thereof. In some embodiments, the VP2 polypeptide has at least 80, 85, 90, 91, 92, 93, 94, 95, 96, 97, 98, 99, or 100% identity to the amino acid sequence of a wildtype dependoparvovirus A or B VP2 polypeptide (e.g., an AAV2, AAV5, or AAV9 VP2 polypeptide), e.g., SEQ ID NO: 322, or differs by no more than 30, 29, 28, 27, 26, 25, 24, 23, 22, 21, 20, 19, 18, 17, 16, 15, 14, 13, 12, 11, 10, 9, 8, 7, 6, 5, 4, 3, 2, or 1 amino acids from a wildtype dependoparvovirus A or B VP2 polypeptide (e.g., an AAV2, AAV5, or AAV9 VP2 polypeptide), e.g., SEQ ID NO: 322.

[0321] In some embodiments, the nucleic acid comprising a sequence encoding an ORF for a functional MAAP polypeptide comprising an exogenous start codon further comprises a sequence encoding VP3 polypeptide or a functional variant or portion thereof. In some embodiments, the VP3 polypeptide has at least 80, 85, 90, 91, 92, 93, 94, 95, 96, 97, 98, 99, or 100% identity to the amino acid sequence of a wildtype dependoparvovirus A or B VP3 polypeptide (e.g., an AAV2, AAV5, or AAV9 VP3 polypeptide), e.g., SEQ ID NO: 323, or differs by no more than 30, 29, 28, 27, 26, 25, 24, 23, 22, 21, 20, 19, 18, 17, 16, 15, 14, 13, 12, 11, 10, 9, 8, 7, 6, 5, 4, 3, 2, or 1 amino acids from a wildtype dependoparvovirus A or B VP3 polypeptide (e.g., an AAV2, AAV5, or AAV9 VP3 polypeptide), e.g., SEQ ID NO: 323.

[0322] Given that dependoparvovirus genomes may comprise multiple genes wherein a plurality of the genes overlap one another, a nucleic acid comprising a sequence encoding an ORF for a functional MAAP polypeptide comprising an exogenous start codon may inherently comprise a portion of sequence encoding another dependoparvovirus gene. Accordingly, when the disclosure recites that such a nucleic acid further comprises a dependoparvovirus gene, it is meant that the nucleic acid comprises all or an additional portion of said dependoparvovirus gene. For example, when the disclosure recites that the nucleic acid further comprises a sequence encoding a VP1 polypeptide, said sequence encoding a VP1 polypeptide would be in addition to any sequence encoding a VP1 polypeptide inherently present in a sequence encoding an ORF for a MAAP polypeptide. In some embodiments of such an example, further comprising a sequence encoding a VP1 polypeptide means the nucleic acid comprises a single sequence that encodes a full length VP1 polypeptide, e.g., that partially overlaps the ORF encoding MAAP. In other embodiments of such an example, further comprising a sequence encoding a VP1 polypeptide means the nucleic acid comprises a VP1 polypeptide encoding sequence (or a functional variant or portion thereof) that does not overlap the ORF encoding MAAP, e.g., in addition to any VP1 encoding sequence inherently present in the ORF encoding MAAP.

[0323] VP1 Nucleic Acids and Polypeptides

[0324] The disclosure is further directed, in part, to a nucleic acid comprising a sequence encoding a dependoparvovirus (e.g., dependoparvovirus B, e.g., an AAV5) VP1 polypeptide, as well as to a VP1 polypeptide encoded by the same. In some embodiments, such nucleic acids further comprise a sequence encoding an ORF for a functional MAAP polypeptide comprising an exogenous start codon. In some embodiments, such nucleic acids comprise a Cap gene, or a portion of a Cap gene encoding VP1. Without wishing to be bound by theory, some naturally occurring dependoparvovirus genomes comprise multiple genes wherein a plurality of the genes overlap one another, with the overlapping genes each positioned in a different ORF (e.g., +0, +1, or +2). For example, the sequence encoding VP1 polypeptide of the Cap gene can overlap (e.g., partially overlap) with the sequence encoding a MAAP polypeptide. Accordingly, a change to the sequence comprising an ORF encoding one gene may affect the ORF of another gene as well. The disclosure is accordingly directed, in part, to a nucleic acid encoding a Cap, e.g., VP1, polypeptide comprising a mutation corresponding to an exogenous start codon in an ORF encoding a MAAP polypeptide, as well as to a Cap, e.g., VP1, polypeptide encoded by the same. In some embodiments, the Cap, e.g., VP1, polypeptide is a functional Cap, e.g., VP1, polypeptide. In some embodiments, the polypeptide produced from the Cap, e.g., VP1, encoding sequence is capable of assembling into a dependoparvovirus capsid, e.g., a dependoparvovirus capsid capable of infecting a target cell.

[0325] In some embodiments, a nucleic acid comprises a sequence encoding an ORF for a functional MAAP polypeptide comprising an exogenous start codon, wherein the exogenous start codon results in a silent mutation in the nucleic acid sequence encoding another dependoparvovirus gene present in the nucleic acid. In some embodiments, a nucleic acid comprises a sequence encoding an ORF for a functional MAAP polypeptide comprising an exogenous start codon, wherein the exogenous start codon results in a change in the amino acid sequence of another dependoparvovirus gene present in the nucleic acid.

[0326] In some embodiments, the exogenous start codon results in an amino acid change in a Cap polypeptide encoded by a sequence of the nucleic acid. In some embodiments, the amino acid change is a conservative mutation. In some embodiments, the amino acid change is not a conservative mutation. The term “conservative” mutation refers to a mutation (e.g., substitution) of an amino acid residue to another amino acid residue, including naturally occurring and non-naturally occurring amino acids, such that there is little or no effect on the polarity or charge of the amino acid residue at that position. For example, a conservative mutation results from the replacement of a non-polar residue in a polypeptide with any other non-polar residue. In some embodiments, any native residue in the polypeptide may also be substituted with alanine, according to the methods of “alanine scanning mutagenesis”. Naturally occurring amino acids are characterized based on their side chains as follows: acidic: glutamic acid, aspartic acid; basic: arginine, lysine, histidine; non-polar: phenylalanine, tryptophan, cysteine, glycine, alanine, valine, proline, methionine, leucine, norleucine, isoleucine; and uncharged polar: glutamine, asparagine, serine, threonine, tyrosine. In some embodiments, the exogenous start codon results in an amino acid change in a VP1 polypeptide encoded by a sequence of the nucleic acid. In some embodiments, the amino acid change is a conservative mutation. In some embodiments, the amino acid change is not a conservative mutation.

[0327] In some embodiments, the Cap polypeptide, e.g., VP1 polypeptide, comprises an amino acid sequence: provided in Table 2; that has at least 80, 85, 90, 91, 92, 93, 94, 95, 96, 97, 98, 99, or 100% identity to an amino acid sequence provided in Table 2; or that differs by no more than 30, 29, 28, 27, 26, 25, 24, 23, 22, 21, 20, 19, 18, 17, 16, 15, 14, 13, 12, 11, 10, 9, 8, 7, 6, 5, 4, 3, 2, or 1 amino acids from an amino acid sequence provided in Table 2. In some embodiments, the Cap polypeptide, e.g., VP1 polypeptide, comprises an alteration (e.g., a substitution) relative to a wildtype VP1 polypeptide sequence (e.g., an AAV2 or AAV5 wildtype VP1 polypeptide, e.g., SEQ ID NOs: 1, 5, 9, 13, 17, 21, 25, 29, 33, 37, 41, 45, 49, 53, 57, 61, 65, 69, 73, 77, 81, 85, 89, 93, 97, 101, 105, 109, 113, 117, 121, 125, 129, 133, 137, 141, 145, 149, 153, 157, 161, 165, 169, 173, 177, 181, 185, 189, 193, 197, 201, 205, 209, 213, 217, 221, 225, 229, 233, 237, 241, 245, 249, 253, 257, 261, 265, 269, 273, 277, 281, 285, 289, 293, 297, 301, 305, 309, 313, or 317). In some embodiments, the alteration is an alteration at position specified by a CIGAR string of column 7 of Table 1. In some embodiments, the Cap, e.g., VP1, polypeptide is a wildtype Cap, e.g., VP1, polypeptide (e.g., a wildtype dependoparvovirus B, e.g., an AAV5, Cap, e.g., VP1, polypeptide) at all other positions besides those affected by the exogenous start codon. In some embodiments, the Cap, e.g., VP1, polypeptide is a wildtype Cap, e.g., VP1, polypeptide (e.g., a wildtype dependoparvovirus B, e.g., an AAV5, Cap, e.g., VP1, polypeptide) at all other positions besides those affected by the exogenous start codon and a position that is altered (relative to a wildtype sequence, e.g., SEQ ID NO: 321) in any of SEQ ID NOs: 1, 5, 9, 13, 17, 21, 25, 29, 33, 37, 41, 45, 49, 53, 57, 61, 65, 69, 73, 77, 81, 85, 89, 93, 97, 101, 105, 109, 113, 117, 121, 125, 129, 133, 137, 141, 145, 149, 153, 157, 161, 165, 169, 173, 177, 181, 185, 189, 193, 197, 201, 205, 209, 213, 217, 221, 225, 229, 233, 237, 241, 245, 249, 253, 257, 261, 265, 269, 273, 277, 281, 285, 289, 293, 297, 301, 305, 309, 313, or 317. In some embodiments, a plurality of the positions altered in any of SEQ ID NOs: 1, 5, 9, 13, 17, 21, 25, 29, 33, 37, 41, 45, 49, 53, 57, 61, 65, 69, 73, 77, 81, 85, 89, 93, 97, 101, 105, 109, 113, 117, 121, 125, 129, 133, 137, 141, 145, 149, 153, 157, 161, 165, 169, 173, 177, 181, 185, 189, 193, 197, 201, 205, 209, 213, 217, 221, 225, 229, 233, 237, 241, 245, 249, 253, 257, 261, 265, 269, 273, 277, 281, 285, 289, 293, 297, 301, 305, 309, 313, or 317 relative to relative to a wildtype sequence, e.g., SEQ ID NO: 321, is altered in the amino acid sequence of the VP1 polypeptide. For example, the VP1 polypeptide may be a wildtype VP1 polypeptide (e.g., a wildtype dependoparvovirus B, e.g., an AAV5, VP1 polypeptide) at all other positions besides those affected by the exogenous start codon and the positions altered (relative to a wildtype sequence, e.g., SEQ ID NO: 321) in any two, three, four, five, six, seven, eight, nine, or ten of SEQ ID NOs: 1, 5, 9, 13, 17, 21, 25, 29, 33, 37, 41, 45, 49, 53, 57, 61, 65, 69, 73, 77, 81, 85, 89, 93, 97, 101, 105, 109, 113, 117, 121, 125, 129, 133, 137, 141, 145, 149, 153, 157, 161, 165, 169, 173, 177, 181, 185, 189, 193, 197, 201, 205, 209, 213, 217, 221, 225, 229, 233, 237, 241, 245, 249, 253, 257, 261, 265, 269, 273, 277, 281, 285, 289, 293, 297, 301, 305, 309, 313, or 317.

[0328] In some embodiments, the Cap polypeptide, e.g., VP1 polypeptide, further comprises an additional alteration (e.g., a substitution, insertion, or deletion) relative to a wildtype sequence (e.g., SEQ ID NO: 321) in addition to any amino acid change resulting from the presence of the exogenous start codon in the ORF encoding MAAP and any alteration present relative to a wildtype sequence in SEQ ID NOs: 1, 5, 9, 13, 17, 21, 25, 29, 33, 37, 41, 45, 49, 53, 57, 61, 65, 69, 73, 77, 81, 85, 89, 93, 97, 101, 105, 109, 113, 117, 121, 125, 129, 133, 137, 141, 145, 149, 153, 157, 161, 165, 169, 173, 177, 181, 185, 189, 193, 197, 201, 205, 209, 213, 217, 221, 225, 229, 233, 237, 241, 245, 249, 253, 257, 261, 265, 269, 273, 277, 281, 285, 289, 293, 297, 301, 305, 309, 313, or 317. In some embodiments, the additional alteration improves a production characteristic of a dependoparvovirus particle or method of making the same. In some embodiments, the additional alteration improves or alters another characteristic of a dependoparvovirus particle, e.g., tropism.

[0329] In some embodiments, the exogenous start codon does not result in an amino acid change in a VP1 polypeptide encoded by a sequence of the nucleic acid.

### Dependoparvovirus Particles

[0330] The disclosure is directed, in part, to a dependoparvovirus particle (e.g., a functional dependoparvovirus particle) comprising a nucleic acid or polypeptide described herein or produced by a method described herein.

[0331] Dependoparvovirus is a single-stranded DNA parvovirus that grows only in cells in which certain functions are provided, e.g., by a co-infecting helper virus. Several species of dependoparvovirus are known, including dependoparvovirus A and dependoparvovirus B, which include serotypes known in the art as adeno-associated viruses (AAV). At least thirteen serotypes of AAV that have been characterized. General information and reviews of AAV can be found in, for example, Carter, Handbook of Parvoviruses, Vol. 1, pp. 169-228 (1989), and Berns, Virology, pp. 1743-1764, Raven Press, (New York, 1990). AAV serotypes, and to a degree, dependoparvovirus species, are significantly interrelated structurally and functionally. (See, for example, Blacklowe, pp. 165-174 of Parvoviruses and Human Disease, J. R. Pattison, ed. (1988); and Rose, Comprehensive Virology 3:1-61 (1974)). For example, all AAV serotypes apparently exhibit very similar replication properties mediated by homologous rep genes; and all bear three related capsid proteins. In addition, heteroduplex analysis reveals extensive cross-hybridization between serotypes along the length of the genome, further suggesting interrelatedness. Dependoparvoviruses genomes also comprise self-annealing segments at the termini that correspond to “inverted terminal repeat sequences” (ITRs).

[0332] The genomic organization of naturally occurring dependoparvoviruses, e.g., AAV serotypes, is very similar. For example, the genome of AAV is a linear, single-stranded DNA molecule that is approximately 5,000 nucleotides (nt) in length or less. Inverted terminal repeats (ITRs) flank the unique coding nucleotide sequences for the non-structural replication (Rep) proteins and the structural capsid (Cap) proteins. Three different viral particle (VP) proteins form the capsid. The terminal 145 nt are self-complementary and are organized so that an energetically stable intramolecular duplex forming a T-shaped hairpin may be formed. These hairpin structures function as an origin for viral DNA replication, serving as primers for the cellular DNA polymerase complex. The Rep genes encode the Rep proteins: Rep78, Rep68, Rep52, and Rep40. Rep78 and Rep68 are transcribed from the p5 promoter, and Rep 52 and Rep40 are transcribed from the p19 promoter. The cap genes encode the VP proteins, VP1, VP2, and VP3. The cap genes are transcribed from the p40 promoter.

[0333] In some embodiments, a dependoparvovirus particle of the disclosure comprises a nucleic acid comprising an ORF encoding MAAP polypeptide comprising an exogenous start codon. In some embodiments, a dependoparvovirus particle of the disclosure does not comprise a nucleic acid comprising an ORF encoding MAAP polypeptide comprising an exogenous start codon, e.g., the particle was made by a cell, cell-free system, or other translation system comprising the nucleic acid comprising an ORF encoding MAAP polypeptide comprising an exogenous start codon. In some embodiments, a dependoparvovirus particle of the disclosure comprises a VP1 polypeptide, wherein the VP1 polypeptide comprises an amino acid change (e.g., relative to a wildtype VP1 amino acid sequence or a reference sequence) corresponding to an exogenous start codon in an ORF encoding a MAAP polypeptide. In some embodiments, a dependoparvovirus particle is produced by a method of making a dependoparvovirus particle described herein.

[0334] A dependoparvovirus particle of the disclosure may be a dependoparvovirus A particle. In some embodiments, the dependoparvovirus A particle comprises a nucleic acid comprising a complete dependoparvovirus genome wherein each gene is derived from a dependoparvovirus A gene (e.g., has at least 80, 85, 90, 91, 92, 93, 94, 95, 96, 97, 98, 99, or 100% identity to a naturally occurring dependoparvovirus A sequence). In some embodiments, the dependoparvovirus A particle comprises a nucleic acid comprising a complete dependoparvovirus genome wherein 1, 2, 3, 4, 5, 6, or more protein encoding sequences (e.g., VP1, VP2, VP3, MAAP, AAP, Rep, or X) is derived from a naturally occurring dependoparvovirus A gene (e.g., has at least 80, 85, 90, 91, 92, 93, 94, 95, 96, 97, 98, 99, or 100% identity to a naturally occurring dependoparvovirus A sequence). In some embodiments, the dependoparvovirus A particle comprises a nucleic acid comprising a complete dependoparvovirus genome wherein 1, 2, 3, or more protein encoding sequences (e.g., VP1, VP2, VP3, MAAP, AAP, Rep, or X) is not derived from a naturally occurring dependoparvovirus A gene (e.g., is derived from a different dependoparvovirus species' gene).

[0335] A dependoparvovirus particle of the disclosure may be a dependoparvovirus B particle. In some embodiments, the dependoparvovirus B particle comprises a nucleic acid comprising a complete dependoparvovirus genome wherein each gene is derived from a dependoparvovirus B gene (e.g., has at least 80, 85, 90, 91, 92, 93, 94, 95, 96, 97, 98, 99, or 100% identity to a naturally occurring dependoparvovirus B sequence). In some embodiments, the dependoparvovirus B particle comprises a nucleic acid comprising a complete dependoparvovirus genome wherein 1, 2, 3, 4, 5, 6, or more protein encoding sequences (e.g., VP1, VP2, VP3, MAAP, AAP, Rep, or X) is derived from a naturally occurring dependoparvovirus B gene (e.g., has at least 80, 85, 90, 91, 92, 93, 94, 95, 96, 97, 98, 99, or 100% identity to a naturally occurring dependoparvovirus B sequence). In some embodiments, the dependoparvovirus B particle comprises a nucleic acid comprising a complete dependoparvovirus genome wherein 1, 2, 3, or more protein encoding sequences (e.g., VP1, VP2, VP3, MAAP, AAP, Rep, or X) is not derived from a naturally occurring dependoparvovirus B gene (e.g., is derived from a different dependoparvovirus species' gene).

[0336] A dependoparvovirus particle of the disclosure may be an AAV5 particle. In some embodiments, the AAV5 particle comprises a nucleic acid comprising a complete dependoparvovirus, e.g., AAV, genome wherein each gene is derived from an AAV5 gene (e.g., has at least 80, 85, 90, 91, 92, 93, 94, 95, 96, 97, 98, 99, or 100% identity to a naturally occurring AAV5 sequence). In some embodiments, the AAV5 particle comprises a nucleic acid comprising a complete dependoparvovirus, e.g., AAV, genome wherein 1, 2, 3, 4, 5, 6, or more protein encoding sequences (e.g., VP1, VP2, VP3, MAAP, AAP, Rep, or X) is derived from a naturally occurring AAV5 gene (e.g., has at least 80, 85, 90, 91, 92, 93, 94, 95, 96, 97, 98, 99, or 100% identity to a naturally occurring AAV5 sequence). In some embodiments, the AAV5 particle comprises a nucleic acid comprising a complete dependoparvovirus, e.g., AAV, genome wherein 1, 2, 3, or more protein encoding sequences (e.g., VP1, VP2, VP3, MAAP, AAP, Rep, or X) is not derived from a naturally occurring AAV5 gene (e.g., is derived from a different dependoparvovirus species' or serotype's gene).

[0337] In some embodiments, a dependoparvovirus particle of the disclosure may be of a serotype other than AAV5. As used herein, ‘other than AAV5’ refers to a serotype of any dependoparvovirus species that is not dependoparvovirus B AAV5. Examples of serotypes other than AAV5 include, but are not limited to: AAV1, AAV2, AAV3a, AAV3b, AAV4, AAV6, AAV7, AAV8, AAV9, AAV10, AAV11, AAV12, AAVrh8, AAVrh10, AAVrh12, AAVrh32.33, AAVrh74, AAV-I-587, AAV-588NGR, AAV-MO7A, AAV-MO7T, AAV-MecA, AAV-MecB, rRGD587, AAV-C4, AAV-D10, AAV-SIG, AAV-MTP, AAV-QPE, AAV-VNT, AAV-CNH, AAV-CAP, AAV-EYH, AAV 587MTP, AAV-r3.45, AAV2-LSS, AAV2-PFG, AAV2-PPS, AAV2-TLH, AAV2-GMN, AAV2-7m8, AAV-Kera1, AAV-Kera2, AAV-Kera3, AAV-588Myc, AAV2-Z34C, AAV2.N587_R588insBAP, AAV2 Ald13, DMD4, DMD6, A588-RGD4C, A588-RGD4CGLS, AAV-VTAGRAP, AAV-APVTRPA, AAV-DLSNLTR, AAV-NQVGSWS, AAV-EARVRPP, AAV-NSVSLYT, AAV-LS1, AAV-LS2, AAV-LS3, AAV-LS4, AAV-RGDLGLS, AAV-RGDMSRE, AAV-ESGLSQS, AAV-EYRDSSG, AAV-DLGSARA, AAV-NDVRSAN, AAV-GPQGKNS, AAV-NSSRDLG, AAV-NDVRAVS, AAV-NDVRSAN, AAV-NDVRAVS, AAV-PRSTSDP, AAV-DIIRA, AAV-SYENV, AAV-PENSV, AAV-LSLAS, AAV-NDVWN, AAV-NRTYS, rAAV2-ESGHGYF, AAV-GQHPRPG, AAV-PSVSPRP, AAV2-VNSTRLP, AAV-GQHPR, AAV-LSPVR, AAV-MSSDP, AAV-GARPS, AAV-GNEVL, AAV-KMRPG, AAV 588MTP, rRGD453ko, AAV-MNVRGDL, AAV-ENVRGDL, A520/N584 (RGD), A584-RGD4C, A584-RGD4CALS, AAV-ΔIV-NGR, AAV-PTP, BAP-AAV1, BAP-AAV1, AAV1-RGD, AAV1-RGD/BAP (90/10) (mosaic capsid), Tet1c-AAV1 (mosaic capsid), AAV1.9-3-SKAGRSP, BAP-AAV3, BAP-AAV4, BAP-AAV4, AAV5-7m8, AAV6-RGD, AAV6-RGD-Y705-731F+T492V, AAV6-RGD-Y705-731F+T492V+K531E, AAV2/8-BP2, AAV8-PRSTSDP, AAV8-ESGLSOS, AAV8-VNSTRLP, AAV8-ASSLNIA, AAV8-PSVSPRP, AAV8-GQHPRPG, AAV8-SEGLKNL, AAV8-7m8, AAV-SLRSPPS, AAV-RGDLRVS, AAV9-NDVRAVS, AAV9-PRSTSDP, AAV9-ESGLSOS, AAV-PHP.B, AAV-PHP.A, AAV9-7m8, or AAV9P1. In some embodiments, a serotype other than AAV5 includes a serotype described in Table 4 of Büning, H, and Srivastava, A. Mol Ther Methods Clin Dev. 2019 Jan. 26; 12:248-265. doi: 10.1016/j.omtm.2019.01.008. eCollection 2019 Mar. 15, which is hereby incorporated by reference.

[0338] A dependoparvovirus particle of the disclosure may be an AAV9 particle. In some embodiments, the AAV9 particle comprises a nucleic acid comprising a complete dependoparvovirus, e.g., AAV, genome wherein each gene is derived from an AAV9 gene (e.g., has at least 80, 85, 90, 91, 92, 93, 94, 95, 96, 97, 98, 99, or 100% identity to a naturally occurring AAV9 sequence). In some embodiments, the AAV9 particle comprises a nucleic acid comprising a complete dependoparvovirus, e.g., AAV, genome wherein 1, 2, 3, 4, 5, 6, or more protein encoding sequences (e.g., VP1, VP2, VP3, MAAP, AAP, Rep, or X) is derived from a naturally occurring AAV9 gene (e.g., has at least 80, 85, 90, 91, 92, 93, 94, 95, 96, 97, 98, 99, or 100% identity to a naturally occurring AAV9 sequence). In some embodiments, the AAV9 particle comprises a nucleic acid comprising a complete dependoparvovirus, e.g., AAV, genome wherein 1, 2, 3, or more protein encoding sequences (e.g., VP1, VP2, VP3, MAAP, AAP, Rep, or X) is not derived from a naturally occurring AAV9 gene (e.g., is derived from a different dependoparvovirus species' or serotype's gene).

[0339] A dependoparvovirus particle of the disclosure may be an AAV2 particle. In some embodiments, the AAV2 particle comprises a nucleic acid comprising a complete dependoparvovirus, e.g., AAV, genome wherein each gene is derived from an AAV2 gene (e.g., has at least 80, 85, 90, 91, 92, 93, 94, 95, 96, 97, 98, 99, or 100% identity to a naturally occurring AAV2 sequence). In some embodiments, the AAV2 particle comprises a nucleic acid comprising a complete dependoparvovirus, e.g., AAV, genome wherein 1, 2, 3, 4, 5, 6, or more protein encoding sequences (e.g., VP1, VP2, VP3, MAAP, AAP, Rep, or X) is derived from a naturally occurring AAV2 gene (e.g., has at least 80, 85, 90, 91, 92, 93, 94, 95, 96, 97, 98, 99, or 100% identity to a naturally occurring AAV2 sequence). In some embodiments, the AAV2 particle comprises a nucleic acid comprising a complete dependoparvovirus, e.g., AAV, genome wherein 1, 2, 3, or more protein encoding sequences (e.g., VP1, VP2, VP3, MAAP, AAP, Rep, or X) is not derived from a naturally occurring AAV2 gene (e.g., is derived from a different dependoparvovirus species' or serotype's gene).

[0340] A dependoparvovirus particle of the disclosure may comprise a nucleic acid comprising an ORF encoding MAAP polypeptide comprising an exogenous start codon described herein. In some embodiments, the dependoparvovirus particle comprises a nucleic acid comprising a dependoparvovirus genome, and the nucleic acid comprising the dependoparvovirus genome also comprises the ORF encoding MAAP polypeptide comprising an exogenous start codon. In some embodiments, the dependoparvovirus particle comprises a first nucleic acid comprising an ORF encoding MAAP polypeptide comprising an exogenous start codon, and a second nucleic acid comprising one or more components of a dependoparvovirus genome (e.g., the rest of the dependoparvovirus genome), wherein if a MAAP encoding sequence is present in said genome it does not comprise an exogenous start codon.

[0341] A dependoparvovirus particle of the disclosure may not comprise a nucleic acid comprising an ORF encoding MAAP polypeptide comprising an exogenous start codon described herein. In some embodiments, a cell, cell free system, or translation system described herein and used to make a dependoparvovirus particle comprises a nucleic acid comprising an ORF encoding MAAP polypeptide comprising an exogenous start codon, but the nucleic acid is not packaged into the dependoparvovirus particle. In some embodiments, the cell, cell free system, or translation system comprises a first nucleic acid comprising a dependoparvovirus genome (e.g., sufficient to promote production of the components of a dependoparvovirus particle) and a second nucleic acid comprising an ORF encoding MAAP polypeptide comprising an exogenous start codon, wherein the first nucleic acid or copies thereof are packaged into a dependoparvovirus particle but the second nucleic acid is not. The first and second nucleic acids may be integrated into the genome of a host cell, disposed on non-genomic nucleic acid (e.g., a vector, e.g., a plasmid), or a combination of both (e.g., the first nucleic acid is disposed on a non-genomic nucleic acid and the second nucleic acid is integrated into the genome of a host cell).

[0342] A dependoparvovirus particle of the disclosure may further comprise a payload. In some embodiments, a dependoparvovirus particle can be used to deliver a payload to a target cell, e.g., in a subject, e.g., a human subject. In some embodiments, delivery of the payload treats a disease or condition in a subject. In some embodiments, delivery of the payload modifies the target cell, e.g., modifies expression of one or more genes in the target cell. In some embodiments, the payload is a therapeutic product, e.g., a product described herein. In some embodiments, the payload is selected from any of: a nucleic acid (e.g., DNA or RNA, e.g., mRNA, siRNA, iRNA, miRNA, piRNA, gRNA, or a sequence encoding the same), a polypeptide, a lipid, or a small molecule (e.g., a drug product). In some embodiments, the payload is a nucleic acid and the payload integrates into a target cell genome. In some embodiments, the payload comprises a sequence encoding a polypeptide product, e.g., a therapeutic polypeptide.

[0343] In some embodiments, a dependoparvovirus particle comprises a dependoparvovirus capsid and a nucleic acid (e.g., comprising a dependoparvovirus genome). In some embodiments, the dependoparvovirus capsid comprises one or more polypeptide products of the Cap gene. In some embodiments, the dependoparvovirus capsid comprises a VP1 polypeptide. In some embodiments, the dependoparvovirus capsid comprises a VP2 polypeptide. In some embodiments, the dependoparvovirus capsid comprises a VP3 polypeptide. In some embodiments, the dependoparvovirus capsid comprises a VP1 polypeptide and a VP2 polypeptide. In some embodiments, the dependoparvovirus capsid comprises a VP1 polypeptide, a VP2 polypeptide, and a VP3 polypeptide. In some embodiments, the dependoparvovirus capsid does not comprise a VP3 polypeptide.

[0344] Without wishing to be bound by theory, it is thought that a method of making a dependoparvovirus particle described herein may produce a dependoparvovirus particle comprising a dependoparvovirus capsid wherein the ratio of VP1 polypeptide to VP2 polypeptide (and optionally to VP3 polypeptide) is altered relative to a dependoparvovirus particle produced by a method or cell, cell free system, or translation system not utilizing a nucleic acid comprising an ORF encoding MAAP polypeptide comprising an exogenous start codon. It is thought that the presence of a mutant MAAP polypeptide, e.g., a MAAP polypeptide comprising a mutation corresponding to the presence of an exogenous start codon in the ORF encoding the MAAP polypeptide, may alter the ratio of VP1, VP2, and optionally VP3 polypeptide present in a dependoparvovirus capsid produced a cell, cell-free system, or translation system. Thus this alteration to the ratio of VP1 polypeptide to VP2 polypeptide (and optionally to VP3 polypeptide) is thought to occur in a mutant MAAP polypeptide dependent fashion.

[0345] In some embodiments, the ratio of VP1 polypeptide to VP2 polypeptide in a dependoparvovirus capsid of a dependoparvovirus particle described herein is greater than the ratio in a reference particle, wherein the production of the reference particle was mediated by a wild type MAAP polypeptide (e.g., a MAAP polypeptide encoded by an ORF not comprising an exogenous start codon). In some embodiments, the ratio of VP1 polypeptide to VP2 polypeptide in a dependoparvovirus capsid of a dependoparvovirus particle described herein is at least 10, 20, 30, 40, 50, 60, 70, 80, 90, or 100% greater than the ratio in a reference particle, wherein the production of the reference particle was mediated by a wild type MAAP polypeptide (e.g., a MAAP polypeptide encoded by an ORF not comprising an exogenous start codon). In some embodiments, the ratio of VP1 polypeptide to VP3 polypeptide in a dependoparvovirus capsid of a dependoparvovirus particle described herein is greater than the ratio in a reference particle, wherein the production of the reference particle was mediated by a wild type MAAP polypeptide (e.g., a MAAP polypeptide encoded by an ORF not comprising an exogenous start codon). In some embodiments, the ratio of VP1 polypeptide to VP3 polypeptide in a dependoparvovirus capsid of a dependoparvovirus particle described herein is at least 10, 20, 30, 40, 50, 60, 70, 80, 90, or 100% greater than the ratio in a reference particle, wherein the production of the reference particle was mediated by a wild type MAAP polypeptide (e.g., a MAAP polypeptide encoded by an ORF not comprising an exogenous start codon).

[0346] In some embodiments, the ratio of VP1 polypeptide to VP2 polypeptide in a dependoparvovirus capsid of a dependoparvovirus particle described herein is greater than 1.1:1, 1.2:1, 1.3:1, 1.4:1, 1.5:1, 1.6:1, 1.7:1, 1.8:1, 1.9:1, 2:1, 2.1:1, 2.2:1, or 2.3:1 (and optionally no more than 2.3:1). In some embodiments, the ratio of VP1 polypeptide to VP2 polypeptide in a dependoparvovirus capsid of a dependoparvovirus particle described herein is between 1.2:1 and 2:1, 1.4:1 and 2:1, 1.6:1 and 2:1, 1.8:1 and 2:1, 1.2:1 and 1.8:1, 1.4:1 and 1.8:1, 1.6:1 and 1.8:1, 1.2:1 and 1.6:1, 1.4:1 and 1.6:1, or 1.2:1 and 1.4:1. In some embodiments, the ratio of VP1 polypeptide to VP2 polypeptide in a dependoparvovirus capsid of a dependoparvovirus particle described herein is about 1.2:1, 1.5:1, or 2:1, e.g., 1.2:1, 1.5:1, or 2:1.

[0347] In some embodiments, the ratio of VP1 polypeptide to VP3 polypeptide in a dependoparvovirus capsid of a dependoparvovirus particle described herein is greater than 1.1:1, 1.2:1, 1.3:1, 1.4:1, 1.5:1, 1.6:1, 1.7:1, 1.8:1, 1.9:1, 2:1, 2.1:1, 2.2:1, or 2.3:1 (and optionally no more than 2.3:1). In some embodiments, the ratio of VP1 polypeptide to VP3 polypeptide in a dependoparvovirus capsid of a dependoparvovirus particle described herein is between 1.2:1 and 2:1, 1.4:1 and 2:1, 1.6:1 and 2:1, 1.8:1 and 2:1, 1.2:1 and 1.8:1, 1.4:1 and 1.8:1, 1.6:1 and 1.8:1, 1.2:1 and 1.6:1, 1.4:1 and 1.6:1, or 1.2:1 and 1.4:1. In some embodiments, the ratio of VP1 polypeptide to VP3 polypeptide in a dependoparvovirus capsid of a dependoparvovirus particle described herein is about 1.2:1, 1.5:1, or 2:1, e.g., 1.2:1, 1.5:1, or 2:1.

[0348] In some embodiments, the ratio of VP1 polypeptide:VP2 polypeptide:VP3 polypeptide in a dependoparvovirus capsid of a dependoparvovirus particle described herein is 1:1:X, wherein X is less than 10, 9, 8, 7, 6, 5, 4, 3, 2, or 1 (e.g., less than 8). In some embodiments, VP3 polypeptide is not present in the dependoparvovirus capsid of a dependoparvovirus particle described herein.

[0349] In some embodiments, the VP3 polypeptide encoding sequence used by a cell, cell-free system, or translation system to make a dependoparvovirus particle described herein does not comprise a mutation that decreases or abrogates the expression of the VP3 polypeptide (e.g., relative to a reference dependoparvovirus VP3 encoding sequence). In some embodiments, the ratio of VP1, VP2, and VP3 polypeptides is altered in a mutant MAAP polypeptide dependent fashion or dependent upon the exogenous start codon in the ORF encoding MAAP (e.g., and not by a mutation to the VP3 polypeptide encoding sequence itself).

[0350] In some embodiments, the VP2 polypeptide encoding sequence used by a cell, cell-free system, or translation system to make a dependoparvovirus particle described herein does not comprise a mutation that decreases or abrogates the expression of the VP2 polypeptide (e.g., relative to a reference dependoparvovirus VP2 encoding sequence). In some embodiments, the ratio of VP1, VP2, and optionally VP3 polypeptides is altered in a mutant MAAP polypeptide dependent fashion or dependent upon the exogenous start codon in the ORF encoding MAAP (e.g., and not by a mutation to the VP2 polypeptide encoding sequence itself).

### Production Characteristics

[0351] The disclosure is directed, in part, to nucleic acids, polypeptides, cells, cell free systems, translation systems, viral particles, and methods associated with improved production of dependoparvovirus particles and based upon use of a nucleic acid comprising an ORF encoding MAAP polypeptide comprising an exogenous start codon. In some embodiments, use of a nucleic acid comprising an ORF encoding MAAP polypeptide comprising an exogenous start codon improves a production characteristic of a cell, cell-free system, or other translation system comprising said nucleic acid, a dependoparvovirus particle produced by said cell or system, and/or a method of making a dependoparvovirus utilizing or producing the same (e.g., relative to an otherwise similar cell, system, particle or method not utilizing the nucleic acid).

[0352] Production characteristics include, but are not limited to: the amount of a dependoparvovirus polypeptide or particle produced intracellularly, the amount of correctly folded dependoparvovirus polypeptide, the amount of correctly assembled dependoparvovirus capsid, the amount of correctly packaged dependoparvovirus particle, the amount of dependoparvovirus particle secreted from the cell, the overall amount of dependoparvovirus particle produced, or any preceding characteristic relative to a unit of time or resource expended, or any preceding characteristic relative to an otherwise similar cell (e.g., comprising an ORF encoding MAAP not comprising the exogenous start codon).

[0353] In some embodiments, a cell, cell-free system, or other translation system, comprising the nucleic acid, or a method of making a dependoparvovirus particle utilizing the same, produces dependoparvovirus particles intracellularly at a level of at least 50, 55, 60, 65, 70, 75, 80, 85, 90, 95, 100, 110, 120, 130, 140, 150, 175, 200, 250, 300, 350, 400, 450, 500, or 1000% the level of an otherwise similar cell, cell-free system, or other translation system (or method utilizing the same) comprising an otherwise similar nucleic acid that does not comprise the exogenous start codon.

[0354] In some embodiments, a cell, cell-free system, or other translation system, comprising the nucleic acid, or a method of making a dependoparvovirus particle utilizing the same, produces dependoparvovirus polypeptides (e.g., Cap, Rep, VP1, VP2, or VP3) at a level of at least 50, 55, 60, 65, 70, 75, 80, 85, 90, 95, 100, 110, 120, 130, 140, 150, 175, 200, 250, 300, 350, 400, 450, 500, or 1000% the level of an otherwise similar cell, cell-free system, or other translation system (or method utilizing the same) comprising an otherwise similar nucleic acid that does not comprise the exogenous start codon.

[0355] In some embodiments, a cell, cell-free system, or other translation system, comprising the nucleic acid, or a method of making a dependoparvovirus particle utilizing the same, produces correctly folded dependoparvovirus polypeptides (e.g., Cap, Rep, VP1, VP2, or VP3) at a level of at least 50, 55, 60, 65, 70, 75, 80, 85, 90, 95, 100, 110, 120, 130, 140, 150, 175, 200, 250, 300, 350, 400, 450, 500, or 1000% the level of an otherwise similar cell, cell-free system, or other translation system (or method utilizing the same) comprising an otherwise similar nucleic acid that does not comprise the exogenous start codon. In some embodiments, correctly folded means a native, wildtype or wildtype-like conformation, e.g., a stable and/or functional conformation.

[0356] In some embodiments, a cell, cell-free system, or other translation system, comprising the nucleic acid, or a method of making a dependoparvovirus particle utilizing the same, produces correctly assembled dependoparvovirus capsids at a level of at least 50, 55, 60, 65, 70, 75, 80, 85, 90, 95, 100, 110, 120, 130, 140, 150, 175, 200, 250, 300, 350, 400, 450, 500, or 1000% the level of an otherwise similar cell, cell-free system, or other translation system (or method utilizing the same) comprising an otherwise similar nucleic acid that does not comprise the exogenous start codon. In some embodiments, correctly assembled means that the capsid assumes a stable structure and/or is functional (e.g., competent for packaging, secretion, and/or infection).

[0357] In some embodiments, a cell, cell-free system, or other translation system, comprising the nucleic acid, or a method of making a dependoparvovirus particle utilizing the same, produces correctly packaged dependoparvovirus particles at a level of at least 50, 55, 60, 65, 70, 75, 80, 85, 90, 95, 100, 110, 120, 130, 140, 150, 175, 200, 250, 300, 350, 400, 450, 500, or 1000% the level of an otherwise similar cell, cell-free system, or other translation system (or method utilizing the same) comprising an otherwise similar nucleic acid that does not comprise the exogenous start codon. In some embodiments, correctly packaged means the dependoparvovirus particle comprises a nucleic acid (e.g., comprising a dependoparvovirus genome and/or a payload), has a stable structure and/or is functional (e.g., competent secretion, and/or infection).

[0358] In some embodiments, a cell, cell-free system, or other translation system, comprising the nucleic acid, or a method of making a dependoparvovirus particle utilizing the same, secretes dependoparvovirus particles at a level of at least 50, 55, 60, 65, 70, 75, 80, 85, 90, 95, 100, 110, 120, 130, 140, 150, 175, 200, 250, 300, 350, 400, 450, 500, or 1000% the level of an otherwise similar cell, cell-free system, or other translation system (or method utilizing the same) comprising an otherwise similar nucleic acid that does not comprise the exogenous start codon.

[0359] In some embodiments, a cell, cell-free system, or other translation system, comprising the nucleic acid, or a method of making a dependoparvovirus particle utilizing the same, produces dependoparvovirus particles (e.g., functional dependoparvovirus particles) at a level of at least 50, 55, 60, 65, 70, 75, 80, 85, 90, 95, 100, 110, 120, 130, 140, 150, 175, 200, 250, 300, 350, 400, 450, 500, or 1000% the level of an otherwise similar cell, cell-free system, or other translation system (or method utilizing the same) comprising an otherwise similar nucleic acid that does not comprise the exogenous start codon.

[0360] Dependoparvovirus variants (e.g., comprising an exogenous start codon in an ORF encoding MAAP) can be characterized by their production efficiency in a cell, cell free system, or other translation system. Production efficiency, as used herein, refers to the abundance of a packaged dependoparvovirus particle, e.g., in a purified viral library. In some embodiments, the production efficiency is given relative to the abundance of a variant in a plasmid library. In some embodiments, abundance is determined by measuring the abundance of packaged dependoparvovirus genomes or of packaged payloads, e.g., by sequencing. In some embodiments, the log (e.g., log 2) of the production efficiency is calculated as the log (e.g., log 2) of the ratio of the production efficiency of a dependoparvovirus particle variant comprising an alteration (e.g., an exogenous start codon in an ORF encoding MAAP) to the production efficiency of an otherwise similar dependoparvovirus particle not comprising the alteration (e.g., wildtype AAV5). In some embodiments, a cell, cell-free system, or other translation system, comprising the nucleic acid, or a method of making a dependoparvovirus particle utilizing the same, has a log 2(production efficiency) value, e.g., log 2(production efficiency relative to AAV5) value, that indicates an increase in production efficiency relative to an otherwise similar cell, cell-free system, or other translation system (or method utilizing the same) comprising an otherwise similar nucleic acid that does not comprise the exogenous start codon. In some embodiments, the log 2(production efficiency) value, e.g., log 2(production efficiency relative to AAV5) value, is at least 1.5, 1.6, 1.7, 1.8, 1.9, 2, 2.5, 3, 3.5, 4, 4.5, 5, 5.5, 6, 6.5, 7, 7.5, 8, 8.5, or 9.

[0361] In some embodiments, the level change is relative to a unit time (e.g., minutes, hours, days, weeks, production cycles, cell divisions, or culture media turnovers) expended. In some embodiments, the level change is relative to a unit of resource expended (e.g., media consumed, nutrients consumed, cells utilized, energy expended (e.g., to operate a bioreactor), or reagent consumed).

[0362] In some embodiments, changes (e.g., improvements) in a production characteristic are dependent upon the dependoparvovirus clade, species, or serotype of the ORF encoding MAAP. The disclosure is based, in part, on the discovery that some naturally occurring ORFs encoding MAAP comprise a non-canonical start codon or no discernable start codon proximal to the beginning of the MAAP encoding sequence. Without wishing to be bound by theory, it is thought that introducing an exogenous start codon, e.g., that is stronger than and/or replaces a weaker non-canonical start codon that might be present proximal to the beginning of the MAAP encoding sequence, increases MAAP expression and improves one or more production characteristics of a cell, cell-free system, other translation system, or a method for making a dependoparvovirus particle. Without wishing to be bound by theory, the expression of a dependoparvovirus ORF encoding MAAP which already comprises a strong (e.g., canonical) endogenous start codon proximal to the start of the MAAP encoding sequence may not increase, e.g., substantially increase, from introduction of an exogenous start codon. However, this in no way limits the type of dependoparvovirus particles which may benefit from application of the improved production characteristics associated with a nucleic acid comprising an ORF encoding a MAAP polypeptide comprising an exogenous start codon. As described herein, a cell, cell-free system, or other translation system may comprise a nucleic acid comprising an ORF encoding a MAAP polypeptide comprising an exogenous start codon and be used to make a dependoparvovirus particle that does not comprise said nucleic acid.

[0363] In some embodiments, a nucleic acid comprises an ORF encoding a MAAP polypeptide comprising an exogenous start codon, wherein the ORF encoding the MAAP polypeptide comprises a non-canonical, e.g., weak, start codon or no discernable start codon proximal to the beginning of the MAAP polypeptide encoding sequence. In some embodiments, a weak start codon is a start codon that promotes translation initiation less strongly than an ATG positioned similarly in an otherwise similar sequence. In some embodiments, a weak start codon is a start codon that promotes translation initiation less strongly than a CTG positioned similarly in an otherwise similar sequence.

### Methods of Making Compositions Described Herein

[0364] The disclosure is directed, in part, to a method of making a dependoparvovirus particle, e.g., a dependoparvovirus particle described herein. In some embodiments, a method of making dependoparvovirus particle comprises providing a cell, cell-free system, or other translation system, comprising a nucleic acid described herein (e.g., a nucleic acid comprising an ORF encoding a functional MAAP polypeptide comprising an exogenous start codon); and cultivating the cell, cell-free system, or other translation system under conditions suitable for the production of the dependoparvovirus particle, thereby making the dependoparvovirus particle.

[0365] The disclosure is based, in part, on the discovery that a method of making a dependoparvovirus particle utilizing a cell, cell-free system, or other translation system comprising a nucleic acid comprising an ORF encoding a functional MAAP polypeptide comprising an exogenous start codon may have one or more improved production characteristics relative to an otherwise similar method utilizing an otherwise similar a cell, cell-free system, or other translation system that lacks the ORF encoding a functional MAAP polypeptide comprising an exogenous start codon. In some embodiments, a method of making a dependoparvovirus particle described herein exhibit an improvement in a production characteristic described herein.

[0366] In some embodiments, providing a cell comprising a nucleic acid described herein comprises introducing the nucleic acid to the cell, e.g., transfecting or transforming the cell with the nucleic acid. The nucleic acids of the disclosure may be situated as a part of any genetic element (vector) which may be delivered to a host cell, e.g., naked DNA, a plasmid, phage, transposon, cosmid, episome, a protein in a non-viral delivery vehicle (e.g., a lipid-based carrier), virus, etc. which transfer the sequences carried thereon. Such a vector may be delivered by any suitable method, including transfection, liposome delivery, electroporation, membrane fusion techniques, viral infection, high velocity DNA-coated pellets, and protoplast fusion. A person of skill in the art possesses the knowledge and skill in nucleic acid manipulation to construct any embodiment of this invention and said skills include genetic engineering, recombinant engineering, and synthetic techniques. See, e.g., Sambrook et al, Molecular Cloning: A Laboratory Manual, Cold Spring Harbor Press, Cold Spring Harbor, NY.

[0367] In some embodiments, a vector of the disclosure comprises sequences encoding a dependoparvovirus capsid or a fragment thereof. In some embodiments, a vectors of the disclosure comprises sequences encoding a dependoparvovirus rep protein or a fragment thereof. In some embodiments, such vectors may contain both dependoparvovirus cap and rep proteins. In vectors in which both AAV rep and cap are provided, the dependoparvovirus rep and dependoparvovirus cap sequences may both be of the same dependoparvovirus species or serotype origin. Alternatively, the present invention provides vectors in which the rep sequences are from a dependoparvovirus species or serotype which differs from that which is providing the cap sequences. In some embodiments, the rep and cap sequences are expressed from separate sources (e.g., separate vectors, or a host cell genome and a vector). In some embodiments, the rep sequences are fused in frame to cap sequences of a different dependoparvovirus species or serotype to form a chimeric dependoparvovirus vector. In some embodiments, the vectors of the invention further contain a payload, e.g., a minigene comprising a selected transgene, e.g., flanked by dependoparvovirus 5′ ITR and dependoparvovirus 3′ ITR.

[0368] The vectors described herein, e.g., a plasmid, are useful for a variety of purposes, but are particularly well suited for use in production of recombinant dependoparvovirus particles comprising dependoparvovirus sequences or a fragment thereof, and in some embodiments, a payload.

[0369] In one aspect, the disclosure provides a method of making a dependoparvovirus particle (e.g., a dependoparvovirus B particle, e.g., an AAV5 particle), or a portion thereof. In some embodiments, the method comprises culturing a host cell which contains a nucleic acid sequence encoding a dependoparvovirus capsid protein, or fragment thereof, as defined herein; a functional rep gene; a payload, e.g., a minigene comprising dependoparvovirus inverted terminal repeats (ITRs) and a transgene; and sufficient helper functions to promote packaging of the payload, e.g., minigene, into the dependoparvovirus capsid. The components necessary to be cultured in the host cell to package a payload, e.g., minigene, in a dependoparvovirus capsid may be provided to the host cell in trans. In some embodiments, any one or more of the required components (e.g., payload (e.g., minigene), rep sequences, cap sequences, and/or helper functions) may be provided by a host cell which has been engineered to stably comprise one or more of the required components using methods known to those of skill in the art. In some embodiments, a host cell which has been engineered to stably comprise the required component(s) comprises it under the control of an inducible promoter. In some embodiments, the required component may be under the control of a constitutive promoter. Examples of suitable inducible and constitutive promoters are provided herein and further examples are known to those of skill in the art. In some embodiments, a selected host cell which has been engineered to stably comprise one or more components may comprise a component under the control of a constitutive promoter and another component under the control of one or more inducible promoters. For example, a host cell which has been engineered to stably comprise the required components may be generated from 293 cells (e.g., which comprise helper functions under the control of a constitutive promoter), which comprises the rep and/or cap proteins under the control of one or more inducible promoters.

[0370] The payload (e.g., minigene), rep sequences, cap sequences, and helper functions required for producing a dependoparvovirus particle of the disclosure may be delivered to the packaging host cell in the form of any genetic element which transfers the sequences carried thereon (e.g., in a vector or combination of vectors). The genetic element may be delivered by any suitable method, including those described herein. Methods used to construct genetic elements, vectors, and other nucleic acids of the disclosure are known to those with skill and include genetic engineering, recombinant engineering, and synthetic techniques. See, e.g., Sambrook et al, Molecular Cloning: A Laboratory Manual, Cold Spring Harbor Press, Cold Spring Harbor, NY. Similarly, methods of generating rAAV virions are well known and the selection of a suitable method is not a limitation on the present invention. See, e.g., K. Fisher et al, J. Virol, 70:520-532 (1993) and U.S. Pat. No. 5,478,745. Unless otherwise specified, the dependoparvovirus ITRs, and other selected dependoparvovirus components described herein, may be readily selected from among any dependoparvovirus species and serotypes, e.g., AAV1, AAV2, AAV3, AAV4, AAV5, AAV6, AAV7, AAV9. ITRs or other dependoparvovirus components may be readily isolated using techniques available to those of skill in the art from a dependoparvovirus species or serotype. Dependoparvovirus species and serotypes may be isolated or obtained from academic, commercial, or public sources (e.g., the American Type Culture Collection, Manassas, VA). In some embodiments, the dependoparvovirus sequences may be obtained through synthetic or other suitable means by reference to published sequences such as are available in the literature or in databases such as, e.g., GenBank or PubMed.

[0371] The dependoparvovirus particles comprising nucleic acids (e.g., including a payload) of the disclosure may be produced using any invertebrate cell type which allows for production of dependoparvovirus or biologic products and which can be maintained in culture. In some embodiments, an insect cell may be used in production of the compositions described herein or in the methods of making a dependoparvovirus particle described herein. For example, an insect cell line used can be from Spodoptera frugiperda, such as Sf9, SF21, SF900+, drosophila cell lines, mosquito cell lines, e.g., Aedes albopictus derived cell lines, domestic silkworm cell lines, e.g. Bombyxmori cell lines, Trichoplusia ni cell lines such as High Five cells or Lepidoptera cell lines such as Ascalapha odorata cell lines. In some embodiments, the insect cells are susceptible to baculovirus infection, including High Five, Sf9, Se301, SeIZD2109, SeUCR1, SP900+, Sf21, BTI-TN-5B1-4, MG-1, Tn368, HzAml, BM-N, Ha2302, Hz2E5 and Ao38.

[0372] In another aspect, the methods of the disclosure can be carried out with any mammalian cell type which allows for replication of dependoparvovirus or production of biologic products, and which can be maintained in culture. In some embodiments, the mammalian cells used can be HEK293, HeLa, CHO, NS0, SP2/0, PER.C6, Vero, RD, BHK, HT 1080, A549, Cos-7, ARPE-19 or MRC-5 cells.

[0373] Methods of expressing proteins (e.g., recombinant or heterologous proteins, e.g., dependoparvovirus polypeptides) in insect cells are well documented, as are methods of introducing nucleic acids, such as vectors, e.g., insect-cell compatible vectors, into such cells and methods of maintaining such cells in culture. See, for example, METHODS IN MOLECULAR BIOLOGY, ed. Richard, Humana Press, N J (1995); O'Reilly et al., BACULOVIRUS EXPRESSION VECTORS, A LABORATORY MANUAL, Oxford Univ. Press (1994); Samulski et al., J. Vir. 63:3822-8 (1989); Kajigaya et al., Proc. Nat'l. Acad. Sci. USA 88:4646-50 (1991); Ruffing et al., J. Vir. 66:6922-30 (1992); Kirnbauer et al., Vir. 219:37-44 (1996); Zhao et al., Vir. 272:382-93 (2000); and Samulski et al., U.S. Pat. No. 6,204,059. In some embodiments, a nucleic acid construct encoding dependoparvovirus polypeptides (e.g., a dependoparvovirus genome) in insect cells is an insect cell-compatible vector. An “insect cell-compatible vector” as used herein refers to a nucleic acid molecule capable of productive transformation or transfection of an insect or insect cell. Exemplary biological vectors include plasmids, linear nucleic acid molecules, and recombinant viruses. Any vector can be employed as long as it is insect cell-compatible. The vector may integrate into the insect cell's genome or remain present extra-chromosomally. The vector may be present permanently or transiently, e.g., as an episomal vector. Vectors may be introduced by any means known in the art. Such means include but are not limited to chemical treatment of the cells, electroporation, or infection. In some embodiments, the vector is a baculovirus, a viral vector, or a plasmid.

[0374] In some embodiments, a nucleic acid sequence encoding an dependoparvovirus polypeptide is operably linked to regulatory expression control sequences for expression in a specific cell type, such as Sf9 or HEK cells. Techniques known to one skilled in the art for expressing foreign genes in insect host cells or mammalian host cells can be used with the compositions and methods of the disclosure. Methods for molecular engineering and expression of polypeptides in insect cells is described, for example, in Summers and Smith. A Manual of Methods for Baculovirus Vectors and Insect Culture Procedures, Texas Agricultural Experimental Station Bull. No. 7555, College Station, Tex. (1986); Luckow. 1991. In Prokop et al., Cloning and Expression of Heterologous Genes in Insect Cells with Baculovirus Vectors' Recombinant DNA Technology and Applications, 97-152 (1986); King, L. A. and R. D. Possee, The baculovirus expression system, Chapman and Hall, United Kingdom (1992); O'Reilly, D. R., L. K. Miller, V. A. Luckow, Baculovirus Expression Vectors: A Laboratory Manual, New York (1992); W. H. Freeman and Richardson, C. D., Baculovirus Expression Protocols, Methods in Molecular Biology, volume 39 (1995); U.S. Pat. No. 4,745,051; US2003148506; and WO 03/074714. Promoters suitable for transcription of a nucleotide sequence encoding a dependoparvovirus polypeptide include the polyhedron, p10, p35 or IE-1 promoters and further promoters described in the above references are also contemplated.

[0375] In some embodiments, providing a cell comprising a nucleic acid described herein comprises acquiring a cell comprising the nucleic acid.

[0376] Methods of cultivating cells, cell-free systems, and other translation systems are known to those of skill in the art. In some embodiments, cultivating a cell comprises providing the cell with suitable media and incubating the cell and media for a time suitable to achieve viral particle production.

[0377] In some embodiments, a method of making a dependoparvovirus particle further comprises a purification step comprising isolating the dependoparvovirus particle from one or more other components (e.g., from a cell or media component).

[0378] In some embodiments, production of the dependoparvovirus particle comprises one or more (e.g., all) of: expression of dependoparvovirus polypeptides, assembly of a dependoparvovirus capsid, expression (e.g., duplication) of a dependoparvovirus genome, and packaging of the dependoparvovirus genome into the dependoparvovirus capsid to produce a dependoparvovirus particle. In some embodiments, production of the dependoparvovirus particle further comprises secretion of the dependoparvovirus particle.

[0379] In some embodiments, and as described elsewhere herein, the nucleic acid comprising an ORF encoding a functional MAAP polypeptide comprising an exogenous start codon is disposed in a dependoparvovirus genome. In some embodiments, the nucleic acid comprising an ORF encoding a functional MAAP polypeptide comprising an exogenous start codon is packaged into a dependoparvovirus particle along with the dependoparvovirus genome as part of a method of making a dependoparvovirus particle described herein. In other embodiments, the nucleic acid comprising an ORF encoding a functional MAAP polypeptide comprising an exogenous start codon is not packaged into a dependoparvovirus particle made by a method described herein.

[0380] In some embodiments, a method of making a dependoparvovirus particle described herein produces a dependoparvovirus particle comprising a payload (e.g., a payload described herein). In some embodiments, the payload comprises a second nucleic acid (e.g., in addition to the dependoparvovirus genome), and production of the dependoparvovirus particle comprises packaging the second nucleic acid into the dependoparvovirus particle. In some embodiments, a cell, cell-free system, or other translation system for use in a method of making a dependoparvovirus particle comprises the second nucleic acid. In some embodiments, the second nucleic acid comprises an exogenous sequence (e.g., exogenous to the dependoparvovirus, the cell, or to a target cell or subject who will be administered the dependoparvovirus particle). In some embodiments, the exogenous sequence encodes an exogenous polypeptide. In some embodiments, the exogenous sequence encodes a therapeutic product.

[0381] The disclosure is based, in part, on the discovery that a method of making a dependoparvovirus particle utilizing a cell, cell-free system, or other translation system comprising a nucleic acid comprising an ORF encoding a functional MAAP polypeptide comprising an exogenous start codon may have one or more improved production characteristics relative to an otherwise similar method utilizing an otherwise similar a cell, cell-free system, or other translation system that lacks the ORF encoding a functional MAAP polypeptide comprising an exogenous start codon. In some embodiments, a method of making a dependoparvovirus particle described herein exhibit an improvement in a production characteristic described herein.

[0382] In some embodiments, a nucleic acid or polypeptide described herein is produced by a method known to one of skill in the art. The nucleic acids, polypeptides, and fragments thereof of the disclosure may be produced by any suitable means, including recombinant production, chemical synthesis, or other synthetic means. Such production methods are within the knowledge of those of skill in the art and are not a limitation of the present invention.

### Applications

[0383] The disclosure is directed, in part, to compositions comprising a nucleic acid, polypeptide, or particles described herein. The disclosure is further directed, in part, to methods utilizing a composition, nucleic acid, polypeptide, or particles described herein. As will be apparent based on the disclosure, nucleic acids, polypeptides, particles, and methods disclosed herein have a variety of utilities.

[0384] The disclosure is directed, in part, to a vector comprising a nucleic acid described herein, e.g., a nucleic acid comprising an ORF encoding a functional MAAP polypeptide comprising an exogenous start codon. Many types of vectors are known to those of skill in the art. In some embodiments, a vector comprises a plasmid. In some embodiments, the vector is an isolated vector, e.g., removed from a cell or other biological components.

[0385] The disclosure is directed, in part to a cell, cell-free system, or other translation system, comprising a nucleic acid or vector described herein, e.g., a nucleic acid or vector comprising an ORF encoding a functional MAAP polypeptide comprising an exogenous start codon. In some embodiments, the cell, cell-free system, or other translation system is capable of producing dependoparvovirus particles. In some embodiments, the cell, cell-free system, or other translation system comprises a nucleic acid comprising a dependoparvovirus genome or components of a dependoparvovirus genome sufficient to promote production of dependoparvovirus particles. In some embodiments, the cell, cell-free system, or other translation system has one or more improved production characteristics, e.g., by virtue of the ORF encoding a functional MAAP polypeptide comprising an exogenous start codon. In some embodiments, cell, cell-free system, or other translation system comprises a dependoparvovirus capsid and/or dependoparvovirus particle (e.g., as described herein).

[0386] In some embodiments, the cell, cell-free system, or other translation system further comprises one or more non-dependoparvovirus nucleic acid sequences that promote dependoparvovirus particle production and/or secretion. Said sequences are referred to herein as helper sequences. In some embodiments, a helper sequence comprises one or more genes from another virus, e.g., an adenovirus or herpes virus. In some embodiments, the presence of a helper sequence is necessary for production and/or secretion of a dependoparvovirus particle. In some embodiments, a cell, cell-free system, or other translation system comprises a vector, e.g., plasmid, comprising one or more helper sequences.

[0387] In some embodiments, a cell, cell-free system, or other translation system comprises a first nucleic acid and a second nucleic acid, wherein the first nucleic acid comprises a sequences encoding one or more dependoparvovirus genes (e.g., a Cap gene, a Rep gene, or a complete dependoparvovirus genome) and a helper sequence, and wherein the second nucleic acid comprises a payload. In some embodiments, a cell, cell-free system, or other translation system comprises a first nucleic acid and a second nucleic acid, wherein the first nucleic acid comprises a sequences encoding one or more dependoparvovirus genes (e.g., a Cap gene, a Rep gene, or a complete dependoparvovirus genome) and a payload, and wherein the second nucleic acid comprises a helper sequence. In some embodiments, a cell, cell-free system, or other translation system comprises a first nucleic acid and a second nucleic acid, wherein the first nucleic acid comprises a helper sequence and a payload, and wherein the second nucleic acid comprises a sequences encoding one or more dependoparvovirus genes (e.g., a Cap gene, a Rep gene, or a complete dependoparvovirus genome). In some embodiments, a cell, cell-free system, or other translation system comprises a first nucleic acid, a second nucleic acid, and a third nucleic acid, wherein the first nucleic acid comprises a sequences encoding one or more dependoparvovirus genes (e.g., a Cap gene, a Rep gene, or a complete dependoparvovirus genome), the second nucleic acid comprises a helper sequence, and the third nucleic acid comprises a payload. In some embodiments, the nucleic acid comprising an ORF encoding MAAP polypeptide comprising an exogenous start codon is part of the sequences encoding one or more dependoparvovirus genes (e.g., a Cap gene, a Rep gene, or a complete dependoparvovirus genome). In some embodiments, the nucleic acid comprising an ORF encoding MAAP polypeptide comprising an exogenous start codon is present as a separate sequence from the sequences encoding one or more dependoparvovirus genes (e.g., a Cap gene, a Rep gene, or a complete dependoparvovirus genome).

[0388] In some embodiments, the first nucleic acid, second nucleic acid, and optionally third nucleic acid are situated in separate molecules, e.g., separate vectors or a vector and genomic DNA. In some embodiments, one, two, or all of the first nucleic acid, second nucleic acid, and optionally third nucleic acid are integrated (e.g., stably integrated) into the genome of a cell.

[0389] A cell of the disclosure may be generated by transfecting a suitable cell with a nucleic acid described herein. In some embodiments, a method of making a dependoparvovirus particle or improving a method of making a dependoparvovirus particle comprises providing a cell described herein. In some embodiments, providing a cell comprises transfecting a suitable cell with one or more nucleic acids described herein.

[0390] Many types and kinds of cells suitable for use with the nucleic acids and vectors described herein are known in the art. In some embodiments, the cell is a human cell. In some embodiments, the cell is an immortalized cell or a cell from a cell line known in the art. In some embodiments, the cell is an HEK293 cell.

[0391] Methods of Delivering a Payload

[0392] The disclosure is directed, in part, to a method of delivering a payload to a cell, e.g., a cell in a subject or in a sample. In some embodiments, a method of delivering a payload to a cell comprises contacting the cell with a dependoparvovirus particle (e.g., described herein) comprising the payload. In some embodiments, the dependoparvovirus particle is a dependoparvovirus particle described herein and comprises a payload described herein.

[0393] In some embodiments, the payload comprises a transgene. In some embodiments, the transgene is a nucleic acid sequence heterologous to the vector sequences flanking the transgene which encodes a polypeptide, RNA (e.g., a miRNA or siRNA) or other product of interest. The nucleic acid of the transgene may be operatively linked to a regulatory component in a manner sufficient to promote transgene transcription, translation, and/or expression in a host cell.

[0394] A transgene may be any polypeptide or RNA encoding sequence and the transgene selected will depend upon the use envisioned. In some embodiments, a transgene comprises a reporter sequence, which upon expression produces a detectable signal. Such reporter sequences include, without limitation, DNA sequences encoding colorimetric reporters (e.g., β-lactamase, β-galactosidase (LacZ), alkaline phosphatase), cell division reporters (e.g., thymidine kinase), fluorescent or luminescence reporters (e.g., green fluorescent protein (GFP) or luciferase), resistance conveying sequences (e.g., chloramphenicol acetyltransferase (CAT)), or membrane bound proteins including to which high affinity antibodies directed thereto exist or can be produced by conventional means, e.g., comprising an antigen tag, e.g., hemagglutinin or Myc.

[0395] In some embodiments, a reporter sequence operably linked with regulatory elements which drive their expression, provide signals detectable by conventional means, including enzymatic, radiographic, colorimetric, fluorescence or other spectrographic assays, fluorescent activating cell sorting assays and immunological assays, including enzyme linked immunosorbent assay (ELISA), radioimmunoassay (RIA) and immunohistochemistry. In some embodiments, the transgene encodes a product which is useful in biology and medicine, such as RNA, proteins, peptides, enzymes, dominant negative mutants. In some embodiments, the RNA comprises a tRNA, ribosomal RNA, dsRNA, catalytic RNAs, small hairpin RNA, siRNA, trans-splicing RNA, and antisense RNAs. In some embodiments, the RNA inhibits or abolishes expression of a targeted nucleic acid sequence in a treated subject (e.g., a human or animal subject).

[0396] In some embodiments, the transgene may be used to correct or ameliorate gene deficiencies. In some embodiments, gene deficiencies include deficiencies in which normal genes are expressed at less than normal levels or deficiencies in which the functional gene product is not expressed. In some embodiments, the transgene encodes a therapeutic protein or polypeptide which is expressed in a host cell. In some embodiments, a dependoparvovirus particle may comprise or deliver multiple transgenes, e.g., to correct or ameliorate a gene defect caused by a multi-subunit protein. In some embodiments, a different transgene (e.g., each situated/delivered in a different dependoparvovirus particle, or in a single dependoparvovirus particle) may be used to encode each subunit of a protein, or to encode different peptides or proteins, e.g., when the size of the DNA encoding the protein subunit is large, e.g., for immunoglobulin, platelet-derived growth factor, or dystrophin protein. In some embodiments, different subunits of a protein may be encoded by the same transgene, e.g., a single transgene encoding each of the subunits with the DNA for each subunit separated by an internal ribozyme entry site (IRES). In some embodiments, the DNA may be separated by sequences encoding a 2A peptide, which self-cleaves in a post-translational event. See, e.g., Donnelly et al, J. Gen. Virol., 78(Pt 1):13-21 (January 1997); Furler, et al, Gene Ther., 8(11):864-873 (June 2001); Klump et al., Gene Ther 8(10):811-817 (May 2001).

[0397] The transgene may encode any biologically active product or other product, e.g., a product desirable for study. Suitable transgenes may be readily selected by persons of skill in the art.

[0398] In some embodiments, the transgene is a heterologous protein. In some embodiments, heterologous protein is a therapeutic protein. Exemplary therapeutic proteins include, but are not limited to, colony stimulating factors (CSF); blood factors, such as β-globin, hemoglobin, tissue plasminogen activator, and coagulation factors; interleukins; soluble receptors, such as soluble TNF-α. receptors, soluble VEGF receptors, soluble interleukin receptors (e.g., soluble IL-1 receptors and soluble type II IL-1 receptors), or ligand-binding fragments of a soluble receptor; growth factors, such as keratinocyte growth factor (KGF), stem cell factor (SCF), or fibroblast growth factor (FGF, such as basic FGF and acidic FGF); enzymes; chemokines; enzyme activators, such as tissue plasminogen activator; angiogenic agents, such as vascular endothelial growth factors, glioma-derived growth factor, angiogenin, or angiogenin-2; anti-angiogenic agents, such as a soluble VEGF receptor; a protein vaccine; neuroactive peptides, such as nerve growth factor (NGF) or oxytocin; thrombolytic agents; tissue factors; macrophage activating factors; tissue inhibitors of metalloproteinases; or IL-1 receptor antagonists

[0399] The disclosure is further directed, in part, to a method of delivering a payload to a subject, e.g., an animal or human subject. In some embodiments, a method of delivering a payload to a subject comprises administering to the subject a dependoparvovirus particle (e.g., described herein) comprising the payload, e.g., in a quantity and for a time sufficient to deliver the payload. In some embodiments, the dependoparvovirus particle is a dependoparvovirus particle described herein and comprises a payload described herein.

[0400] Methods of Improving a Dependoparvovirus Production Process

[0401] The disclosure is directed, in part, to a method of improving a dependoparvovirus particle production process (e.g., a method of making a dependoparvovirus particle). In some embodiments, the method of improving a dependoparvovirus particle production process comprises contacting a cell, cell-free system, or translation system with a nucleic acid comprising an ORF encoding a functional MAAP polypeptide comprising an exogenous start codon, thereby improving the dependoparvovirus particle production process. In some embodiments, introducing a nucleic acid comprising an ORF encoding a functional MAAP polypeptide comprising an exogenous start codon into a cell, cell-free system, or translation system used to make dependoparvovirus particles improves one or more production characteristics (e.g., a production characteristic described herein) of the cell, cell-free system, or translation system, or method of making a dependoparvovirus particle utilizing the same.

[0402] Methods of Treatment

[0403] The disclosure is directed, in part, to a method of treating a disease or condition in a subject, e.g., an animal or human subject. In some embodiments, a method of treating a disease or condition in a subject comprises administering to the subject a dependoparvovirus particle described herein, e.g., comprising a payload described herein. In some embodiments, the dependoparvovirus particle comprising a payload described herein is administered in an amount and/or time effective to treat the disease or condition. In some embodiments, the payload is a therapeutic product. In some embodiments, the payload is a nucleic acid, e.g., encoding an exogenous polypeptide.

[0404] The dependoparvovirus particles described herein or produced by the methods described herein can be used to express one or more therapeutic proteins to treat various diseases or disorders. In some embodiments, the disease or disorder is a cancer, e.g., a cancer such as carcinoma, sarcoma, leukemia, lymphoma; or an autoimmune disease, e.g., multiple sclerosis. Non-limiting examples of carcinomas include esophageal carcinoma; bronchogenic carcinoma; colon carcinoma; colorectal carcinoma; gastric carcinoma; hepatocellular carcinoma; basal cell carcinoma, squamous cell carcinoma (various tissues); bladder carcinoma, including transitional cell carcinoma; lung carcinoma, including small cell carcinoma and non-small cell carcinoma of the lung; adrenocortical carcinoma; sweat gland carcinoma; sebaceous gland carcinoma; thyroid carcinoma; pancreatic carcinoma; breast carcinoma; ovarian carcinoma; prostate carcinoma; adenocarcinoma; papillary carcinoma; papillary adenocarcinoma; cystadenocarcinoma; medullary carcinoma; renal cell carcinoma; uterine carcinoma; testicular carcinoma; osteogenic carcinoma; ductal carcinoma in situ or bile duct carcinoma; choriocarcinoma; seminoma; embryonal carcinoma; Wilm's tumor; cervical carcinoma; epithelial carcinoma; and nasopharyngeal carcinoma. Non-limiting examples of sarcomas include fibrosarcoma, myxosarcoma, liposarcoma, angiosarcoma, endotheliosarcoma, lymphangiosarcoma, chondrosarcoma, chordoma, osteogenic sarcoma, osteosarcoma, lymphangioendotheliosarcoma, synovioma, mesothelioma, Ewing's sarcoma, leiomyosarcoma, rhabdomyosarcoma, and other soft tissue sarcomas. Non-limiting examples of solid tumors include ependymoma, pinealoma, hemangioblastoma, acoustic neuroma, oligodendroglioma, glioma, astrocytoma, medulloblastoma, craniopharyngioma, menangioma, melanoma, neuroblastoma, and retinoblastoma. Non-limiting examples of leukemias include chronic myeloproliferative syndromes; T-cell CLL prolymphocytic leukemia, acute myelogenous leukemias; chronic lymphocytic leukemias, including B-cell CLL, hairy cell leukemia; and acute lymphoblastic leukemias. Examples of lymphomas include, but are not limited to, B-cell lymphomas, such as Burkitt's lymphoma; and Hodgkin's lymphoma. In some embodiments, the disease or disorder is a genetic disorder. In some embodiments, the genetic disorder is sickle cell anemia, Glycogen storage diseases (GSD, e.g., GSD types I, II, III, IV, V, VI, VII, VIII, IX, X, XI, XII, XIII, and XIV), cystic fibrosis, lysosomal acid lipase (LAL) deficiency 1, Tay-Sachs disease, Phenylketonuria, Mucopolysaccharidoses, Galactosemia, muscular dystrophy (e.g., Duchenne muscular dystrophy), hemophilia such as hemophilia A (classic hemophilia) or hemophilia B (Christmas Disease), Wilson's disease, Fabry Disease, Gaucher Disease hereditary angioedema (HAE), and alpha 1 antitrypsin deficiency.

[0405] In some embodiments, administration of a dependoparvovirus particle comprising a payload (e.g., a transgene) to a subject induces expression of the payload (e.g., transgene) in a subject. The amount of a payload, e.g., transgene, e.g., heterologous protein, e.g., therapeutic polypeptide, expressed in a subject (e.g., the serum of the subject) can vary. For example, in some embodiments the payload, e.g., protein or RNA product of a transgene, can be expressed in the serum of the subject in the amount of at least about 9 μg/ml, at least about 10 μg/ml, at least about 50 μg/ml, at least about 100 μg/ml, at least about 200 μg/ml, at least about 300 μg/ml, at least about 400 μg/ml, at least about 500 μg/ml, at least about 600 μg/ml, at least about 700 μg/ml, at least about 800 μg/ml, at least about 900 μg/ml, or at least about 1000 μg/ml. In some embodiments, the payload, e.g., protein or RNA product of a transgene, is expressed in the serum of the subject in the amount of about 9 μg/ml, about 10 μg/ml, about 50 μg/ml, about 100 μg/ml, about 200 μg/ml, about 300 μg/ml, about 400 μg/ml, about 500 μg/ml, about 600 μg/ml, about 700 μg/ml, about 800 μg/ml, about 900 μg/ml, about 1000 μg/ml, about 1500 μg/ml, about 2000 μg/ml, about 2500 μg/ml, or a range between any two of these values.

[0406] Sequences disclosed herein may be described in terms of percent identity. A person of skill will understand that such characteristics involve alignment of two or more sequences. Alignments may be performed using any of a variety of publicly or commercially available Multiple Sequence Alignment Programs, such as “Clustal W”, accessible via the Internet. As another example, nucleic acid sequences may be compared using FASTA, a program in GCG Version 6.1. FASTA provides alignments and percent sequence identity of the regions of the best overlap between the query and search sequences. For instance, percent identity between nucleic acid sequences may be determined using FASTA with its default parameters as provided in GCG Version 6.1, herein incorporated by reference. Similar programs are available for amino acid sequences, e.g., the “Clustal X” program. Additional sequence alignment tools that may be used are provided by (protein sequence alignment; (Error! Hyperlink reference not valid. and (nucleic acid alignment; http://www“dot”ebi“dot”ac“dot”uk/Tools/psa/emboss_needle/nucleotide“dot”html)). Generally, any of these programs may be used at default settings, although one of skill in the art can alter these settings as needed. Alternatively, one of skill in the art can utilize another algorithm or computer program which provides at least the level of identity or alignment as that provided by the referenced algorithms and programs. Sequences disclosed herein may further be described in terms of edit distance. The minimum number of sequence edits (i.e., additions, substitutions, or deletions of a single base or nucleotide) which change one sequence into another sequence is the edit distance between the two sequences. In some embodiments, the distance between two sequences is calculated as the Levenshtein distance.

[0407] All publications, patent applications, patents, and other publications and references (e.g., sequence database reference numbers) cited herein are incorporated by reference in their entirety. For example, all GenBank, Unigene, and Entrez sequences referred to herein, e.g., in any Table herein, are incorporated by reference. Unless otherwise specified, the sequence accession numbers specified herein, including in any Table herein, refer to the database entries current as of Aug. 21, 2020. When one gene or protein references a plurality of sequence accession numbers, all of the sequence variants are encompassed.

[0408] The invention is further illustrated by the following examples. The examples are provided for illustrative purposes only and are not to be construed as limiting the scope or content of the invention in any way.

### EXAMPLES

### Example 1: Introduction of ATG into AAV5 MAAP Encoding Sequence Improves Viral Particle Packaging

[0409] This example describes how introduction of an ATG start codon in the ORF for AAV5 MAAP improved one or more production characteristics, e.g., production of a resulting dependoparvovirus particle. A library of mutant dependoparvovirus B (e.g., AAV5) sequences were generated and tested for changes in one or more production characteristics. Introduction of new +1 frame ATGs proximal to the start of the MAAP encoding sequence resulted in an apparent “superpackager” phenotype characterized by an increased production efficiency. These new +1 ATGs clustered around the start of MAAP, both upstream and downstream. Introduction of new ATGs in other regions or in other frames did not significantly improve production. FIG. 1 shows the production rate for new AAV5 variants that introduce new ATGs.

[0410] The superpackager phenotype resulted from +1 ATG in or near MAAP, and in particular in the region surrounding the putative beginning of the MAAP encoding sequence (see FIG. 2, graph A for a magnified view of said region). ATGs in other reading frames (the +0 VP1 reading frame or the +2 frame) did not produce superpackager phenotypes. The results show that introduction of new +1 frame exogenous start codons (ATGs) proximal to the start of the putative MAAP encoding sequence resulted in a significant increase in packaging and production efficiency of viral particles.

### Example 2: Introduction of CTG into AAV5 MAAP Encoding Sequence Improves Viral Particle Packaging

[0411] This example describes how introduction of a CTG start codon in the ORF for AAV5 MAAP improved one or more production characteristics, e.g., production of a resulting dependoparvovirus particle. The library generated in Example 1 was queried for the effect of CTG introduction in the +1 frame in and around the MAAP encoding sequence of AAV5. Several +1 CTGs improve production of dependoparvovirus particles (FIG. 2). Some CTGs that improved production were located at a position corresponding to the start position of MAAP in other dependoparvovirus serotypes.

[0412] The results show that introduction of new +1 frame exogenous start codons (CTGs) proximal to the start of the MAAP encoding sequence resulted in an increase in production efficiency of viral particles.

1. A nucleic acid comprising a sequence encoding an ORF for a functional dependoparvovirus B (e.g., an adeno-associated dependoparvovirus (AAV), e.g. AAV5) MAAP polypeptide, which ORF comprises an exogenous start codon.

2. The nucleic acid of claim 1, wherein a cell, cell-free system, or other translation system, comprising the nucleic acid packages, secretes, and/or produces a dependoparvovirus (e.g., dependoparvovirus A or B, e.g., an adeno-associated dependoparvovirus (AAV), e.g. AAV5 a serotype other than AAV5) particle at a level of at least 50% or more than that of a cell, cell-free system, or other translation system, comprising an otherwise similar nucleic acid that does not comprise the exogenous start codon.

3. The nucleic acid of either of embodiments 1 or 2, wherein the sequence comprises a change or mutation at a position between or including nucleotides 14 to 250 of a VP1 encoding sequence (e.g., a sequence encoding AAV5 VP1, e.g., SEQ ID NO: 327) that creates an exogenous start codon at the position.

4. The nucleic acid of any of claims 1-3, wherein the sequence comprises a change or mutation at any of the positions listed in columns 4 or 5 of Table 1, or at a site one or two nucleotides downstream of said position, that creates an exogenous start codon at the position.

5. The nucleic acid of either of claim 3 or 4, wherein the change or mutation is relative to a reference sequence comprising a wildtype sequence, e.g., SEQ ID NO: 331, or a sequence with at least 90 or 95% sequence identity with a wildtype sequence, e.g., SEQ ID NO: 331.

6. The nucleic acid of any of the above claims, wherein the functional dependoparvovirus B (e.g., AAV5) MAAP polypeptide ORF:
(a) mediates detectable translation initiation in a cell, e.g., a human cell, cell-free system, or other translation system, or
(b) if present in a cell, cell-free system, or other translation system, otherwise competent for producing dependoparvovirus particles, allows for the production of dependoparvovirus particles.

7. The nucleic acid of any of the above claims, wherein the MAAP polypeptide has at least 90% sequence identity to SEQ ID NO: 325.

8. The nucleic acid of any of the above claims, wherein the MAAP polypeptide, except for the amino acid specified by the exogenous start codon, differs from the sequence of SEQ ID NO: 325, by no more than 10 amino acid residues.

9. The nucleic acid of any of the above claims, wherein the exogenous start codon is an ATG or CTG.

10. The nucleic acid of any of the above claims wherein the MAAP polypeptide comprises at least 80, 85, 90, 95, 100, 105, 110, 115, or 116 amino acids (e.g., a full length MAAP polypeptide) and optionally no more than 120, 119, 118, 117, 116, 115, 110, 105, or 100 amino acids.

11. The nucleic acid of any of the above claims, wherein the ORF encoding MAAP comprises a nucleic acid sequence with at least 80, 85, 90, 91, 92, 93, 94, 95, 96, 97, 98, 99, or 100% identity to any of SEQ ID NOs: 4, 8, 12, 16, 20, 24, 28, 32, 36, 40, 44, 48, 52, 56, 60, 64, 68, 72, 76, 80, 84, 88, 92, 96, 100, 104, 108, 112, 116, 120, 124, 128, 132, 136, 140, 144, 148, 152, 156, 160, 164, 168, 172, 176, 180, 184, 188, 192, 196, 200, 204, 208, 212, 216, 220, 224, 228, 232, 236, 240, 244, 248, 252, 256, 260, 264, 268, 272, 276, 280, 284, 288, 292, 296, 300, 304, 308, 312, 316, or 320.

12. The nucleic acid of any of the above claims, wherein the MAAP polypeptide is an AAV5 MAAP polypeptide.

13. The nucleic acid of any of the above claims, further comprising a sequence encoding a dependoparvovirus (e.g., dependoparvovirus B, e.g., an AAV5) VP1 polypeptide.

14. The nucleic acid of claim 13, wherein the VP1 polypeptide has at least 90% sequence identity to SEQ ID NO: 321.

15. The nucleic acid of either claim 13 or 14, wherein the VP1 polypeptide, except for the amino acid specified by the exogenous start codon, differs from the sequence of SEQ ID NO: 321, by no more than 10 amino acid residues.

16. The nucleic acid of any of claims 13-45, wherein the sequence encoding the VP1 polypeptide comprises a nucleic acid sequence with at least 80, 85, 90, 91, 92, 93, 94, 95, 96, 97, 98, 99, or 100% identity to any of SEQ ID NOs: 2, 6, 10, 14, 18, 22, 26, 30, 34, 38, 42, 46, 50, 54, 58, 62, 66, 70, 74, 78, 82, 86, 90, 94, 98, 102, 106, 110, 114, 118, 122, 126, 130, 134, 138, 142, 146, 150, 154, 158, 162, 166, 170, 174, 178, 182, 186, 190, 194, 198, 202, 206, 210, 214, 218, 222, 226, 230, 234, 238, 242, 246, 250, 254, 258, 262, 266, 270, 274, 278, 282, 286, 290, 294, 298, 302, 306, 310, 314, or 318.

17. The nucleic acid of any of the above claims, further comprising a sequence encoding a dependoparvovirus (e.g., dependoparvovirus B, e.g., AAV5 or a serotype other than AAV5) Cap polypeptide.

18. The nucleic acid of claim 17, wherein the Cap polypeptide has at least 90% sequence identity to SEQ ID NO: 321.

19. The nucleic acid of either of claim 17 or 18, wherein the Cap polypeptide, except for the amino acid specified by the exogenous start codon, differs from the sequence of SEQ ID NO: 321, by no more than 10 amino acid residues.

20. The nucleic acid of any of the above claims, further comprising a sequence encoding a dependoparvovirus (e.g., dependoparvovirus A or B) Rep polypeptide, e.g, encoding an AAV2 or AAV5 Rep polypeptide.

21. The nucleic acid of claim 20, wherein the Rep polypeptide has at least 90% sequence identity to any of SEQ ID NOs: 333-336.

22. The nucleic acid of either of claim 20 or 21, wherein the Rep polypeptide differs from the sequence of any of SEQ ID NOs: 333-336, by no more than 10 amino acid residues.

23. The nucleic acid of any of claims 13-22, wherein one or more or all of the VP1, Cap, or Rep polypeptides is, respectively, an AAV5 VP1, Cap, or Rep polypeptide.

24. The nucleic acid of any of the above claims, further comprising an AAV Cap gene that comprises a sequence encoding VP3, VP2, VP1, AAP, Rep, or X gene that does not naturally occur in an AAV5 genome.

25. The nucleic acid of any of claims 13-24, wherein the polypeptide sequence encoded by the dependoparvovirus Cap gene, e.g., the VP1 polypeptide sequence, comprises a mutation (e.g., a substitution) corresponding to the exogenous start codon in the MAAP polypeptide ORF.

26. The nucleic acid of any of claims 13-24, wherein the polypeptide sequence encoded by the dependoparvovirus Cap gene, e.g., the VP1 polypeptide sequence, does not comprises a mutation (e.g., a substitution) corresponding to the exogenous start codon in the MAAP polypeptide ORF.

27. The nucleic acid of any of claims 13-25, wherein the polypeptide sequence encoded by the dependoparvovirus Cap gene, e.g., the VP1 polypeptide sequence, comprises a mutation corresponding to a difference between any of SEQ ID NOs: 1, 5, 9, 13, 17, 21, 25, 29, 33, 37, 41, 45, 49, 53, 57, 61, 65, 69, 73, 77, 81, 85, 89, 93, 97, 101, 105, 109, 113, 117, 121, 125, 129, 133, 137, 141, 145, 149, 153, 157, 161, 165, 169, 173, 177, 181, 185, 189, 193, 197, 201, 205, 209, 213, 217, 221, 225, 229, 233, 237, 241, 245, 249, 253, 257, 261, 265, 269, 273, 277, 281, 285, 289, 293, 297, 301, 305, 309, 313, or 317, and a wildtype VP1 polypeptide sequence, e.g., SEQ ID NO: 321.

28. The nucleic acid of any of claims 17-27, wherein the polypeptide produced from the Cap gene is functional, e.g., capable of assembling into a dependoparvovirus capsid, capable of packaging dependoparvovirus DNA into a dependoparvovirus capsid, or the dependoparvovirus capsid assembled from the polypeptide produced from the Cap gene is capable of infecting a target cell.

29. The nucleic acid of any of the above claims, wherein a cell, cell-free system, or other translation system, comprising the nucleic acid secretes functional dependoparvovirus particle at a level of at least 60, 70, 80, 90, 100, 110, 120, 130, 140, 150, 160, 170, 180, 190, 200, 250, 300, 350, 400, 450, 500, 600, 700, 800, 900, or 1000% that of a cell, cell-free system, or other translation system, comprising an otherwise similar nucleic acid that does not comprise the exogenous start codon.

30. The nucleic acid of any of the above claims, wherein a cell, cell-free system, or other translation system, comprising the nucleic acid secretes more functional dependoparvovirus particle than a cell, cell-free system, or other translation system, comprising an otherwise similar nucleic acid that does not comprise the exogenous start codon.

31. A dependoparvovirus particle comprising the nucleic acid of any of the above claims.

32. The dependoparvovirus particle of claim 31, wherein the dependoparvovirus particle is an adeno-associated dependoparvovirus (AAV) particle.

33. A vector, e.g., a plasmid, comprising the nucleic acid of any of claims 1-30.

34. A cell, cell-free system, or other translation system, comprising the nucleic acid, vector, or particle of any of claims 1-33.

35. A dependoparvovirus B (e.g., AAV5) MAAP polypeptide, an amino acid of which corresponds to an exogenous start codon.

36. A dependoparvovirus B (e.g., AAV5) MAAP polypeptide encoded by a nucleic acid of any of claims 1-30.

37. The dependoparvovirus B (e.g., AAV5) MAAP polypeptide of either of claim 35 or 36, wherein a cell, cell-free system, or other translation system, comprising the MAAP polypeptide packages, secretes, and/or produces dependoparvovirus (e.g., dependoparvovirus A or B, e.g., an adeno-associated dependoparvovirus (AAV), e.g. AAV5 or a serotype other than AAV5) particle at a level of at least 50% or more than that of a cell, cell-free system, or other translation system, comprising an otherwise similar MAAP polypeptide that does not comprise the amino acid corresponding to the exogenous start codon.

38. The dependoparvovirus B (e.g., AAV5) MAAP polypeptide of any of claims 35-37, wherein the amino acid corresponding to the exogenous start codon comprises a methionine or a leucine.

39. The dependoparvovirus B (e.g., AAV5) MAAP polypeptide of any of claims 35-38, wherein the MAAP polypeptide comprises an amino acid sequence with at least 80, 85, 90, 91, 92, 93, 94, 95, 96, 97, 98, 99, or 100% identity to any of SEQ ID NOs: 3, 7, 11, 15, 19, 23, 27, 31, 35, 39, 43, 47, 51, 55, 59, 63, 67, 71, 75, 79, 83, 87, 91, 95, 99, 103, 107, 111, 115, 119, 123, 127, 131, 135, 139, 143, 147, 151, 155, 159, 163, 167, 171, 175, 179, 183, 187, 191, 195, 199, 203, 207, 211, 215, 219, 223, 227, 231, 235, 239, 243, 247, 251, 255, 259, 263, 267, 271, 275, 279, 283, 287, 291, 295, 299, 303, 307, 311, 315, or 319.

40. A nucleic acid comprising a sequence encoding a VP1 polypeptide, wherein the VP1 encoding sequence comprises a change or mutation corresponding to or arising from the presence of sequence encoding an exogenous start codon in the MAAP polypeptide encoding sequence.

41. The nucleic acid of claim 40, wherein the sequence encoding the VP1 polypeptide comprises a nucleic acid sequence with at least 80, 85, 90, 91, 92, 93, 94, 95, 96, 97, 98, 99, or 100% identity to any of SEQ ID NOs: 2, 6, 10, 14, 18, 22, 26, 30, 34, 38, 42, 46, 50, 54, 58, 62, 66, 70, 74, 78, 82, 86, 90, 94, 98, 102, 106, 110, 114, 118, 122, 126, 130, 134, 138, 142, 146, 150, 154, 158, 162, 166, 170, 174, 178, 182, 186, 190, 194, 198, 202, 206, 210, 214, 218, 222, 226, 230, 234, 238, 242, 246, 250, 254, 258, 262, 266, 270, 274, 278, 282, 286, 290, 294, 298, 302, 306, 310, 314, or 318.

42. The nucleic acid of either of claim 40 or 41, wherein the MAAP polypeptide is a dependoparvovirus B (e.g., AAV5) MAAP polypeptide.

43. The nucleic acid of any of claims 40-42, wherein the VP1 polypeptide is a dependoparvovirus (e.g., dependoparvovirus A or B, e.g., AAV5 or a serotype other than AAV5) VP1 polypeptide.

44. A VP1 polypeptide comprising (a) any one of SEQ ID NOs: 1, 5, 9, 13, 17, 21, 25, 29, 33, 37, 41, 45, 49, 53, 57, 61, 65, 69, 73, 77, 81, 85, 89, 93, 97, 101, 105, 109, 113, 117, 121, 125, 129, 133, 137, 141, 145, 149, 153, 157, 161, 165, 169, 173, 177, 181, 185, 189, 193, 197, 201, 205, 209, 213, 217, 221, 225, 229, 233, 237, 241, 245, 249, 253, 257, 261, 165, 269, 273, 277, 281, 285, 289, 293, 297, 301, 305, 309, 313, or 317; or (b) a sequence encoded by the nucleic acid of any of claims 38-41.

45. A dependoparvovirus (e.g., dependoparvovirus A or B, e.g., AAV5 or a serotype other than AAV5) particle comprising the nucleic acid or VP1 polypeptide of any of claims 40-44.

46. A vector, e.g., a plasmid, comprising the nucleic acid of any of claims 40-45.

47. A cell, cell-free system, or other translation system, comprising the nucleic acid, vector, VP1 polypeptide, or particle of any of claims 40-46.

48. A method of making a dependoparvovirus (e.g., dependoparvovirus A or B, e.g., an adeno-associated dependoparvovirus (AAV), e.g. AAV5 or a serotype other than AAV5) particle, comprising:
providing a cell, cell-free system, or other translation system, comprising:
a nucleic acid of any of claims 1-29; and
cultivating the cell, cell-free system, or other translation system, under conditions suitable for the production of the dependoparvovirus particle,
thereby making the dependoparvovirus particle.

49. The method of claim 48, wherein the cell, cell-free system, or other translation system comprises a second nucleic acid molecule and said second nucleic acid molecule is packaged in the dependoparvovirus particle.

50. The method of claim 49, wherein the second nucleic acid comprises an exogenous sequence, e.g., encoding an exogenous polypeptide, e.g., a therapeutic product.

51. The method of either of claim 49 or 50, wherein a nucleic acid of any of claims 1-30 mediates the production of a dependoparvovirus particle which does not include said nucleic acid of any of claims 1-30.

52. The method of any of claims 48-51, wherein the dependoparvovirus particle is an adeno-associated dependoparvovirus (AAV) particle, e.g., an AAV5 particle or a particle of a serotype other than AAV5.

53. A method of delivering a payload (e.g., a nucleic acid) to a cell comprising contacting the cell with a dependoparvovirus particle comprising the payload, wherein the dependoparvovirus particle is:
a dependoparvovirus particle of any of claim 31, 32, or 45,
a dependoparvovirus particle made by a method of any of claims 48-52, or
a dependoparvovirus particle comprising a nucleic acid or polypeptide of any of claim 1-30, 33, 35-44, or 46.

54. A method of delivering a payload (e.g., a nucleic acid) to a subject comprising administering to the subject a dependoparvovirus particle comprising the payload, wherein the dependoparvovirus particle is:
a dependoparvovirus particle of any of claim 31, 32, or 45,
a dependoparvovirus particle made by a method of any of claims 48-52, or
a dependoparvovirus particle comprising a nucleic acid or polypeptide of any of claim 1-30, 33, 35-44, or 46.

55. The method of either of claim 53 or 54, wherein the particle delivers the payload to a preselected target cell, organ, tissue, or region.

56. A method of treating a disease or condition in a subject, comprising administering to the subject a dependoparvovirus particle in an amount effective to treat the disease or condition, wherein the dependoparvovirus particle is:
a dependoparvovirus particle of any of claim 31, 32, or 45,
a dependoparvovirus particle made by a method of any of claims 48-52, or
a dependoparvovirus particle comprising a nucleic acid or polypeptide of any of claim 1-30, 33, 35-44, or 46.

The application's sequence listing, which the Patent Office published only in electronic form, follows.

SEQUENCE LISTING (350 sequences)

SEQ ID NO: 1 - protein, 724 aa, Artificial Sequence
  synthetic sequence
MSFVDHPPDWLEEVGEGLREFLGLDAGPPKPKPNQQHQDQARGLVLPGYNYLGPGNGLDRGEPVNRADEVAREHDISYNEQLEAGDNPYLKYNHADAEFQEKLADDTSFGGNLGKAVFQAKKRVLEPFGLVEEGAKTAPTGKRIDDHFPKRKKARTEEDSKPSTSSDAEAGPSGSQQLQIPAQPASSLGADTMSAGGGGPLGDNNQGADGVGNASGDWHCDSTWMGDRVVTKSTRTWVLPSYNNHQYREIKSGSVDGSNANAYFGYSTPWGYFDFNRFHSHWSPRDWQRLINNYWGFRPRSLRVKIFNIQVKEVTVQDSTTTIANNLTSTVQVFTDDDYQLPYVVGNGTEGCLPAFPPQVFTLPQYGYATLNRDNTENPTERSSFFCLEYFPSKMLRTGNNFEFTYNFEEVPFHSSFAPSQNLFKLANPLVDQYLYRFVSTNNTGGVQFNKNLAGRYANTYKNWFPGPMGRTQGWNLGSGVNRASVSAFATTNRMELEGASYQVPPQPNGMTNNLQGSNTYALENTMIFNSQPANPGTTATYLEGNMLITSESETQPVNRVAYNVGGQMATNNQSSTTAPATGTYNLQEIVPGSVWMERDVYLQGPIWAKIPETGAHFHPSPAMGGFGLKHPPPMMLIKNTPVPGNITSFSDVPVSSFITQYSTGQVTVEMEWELKKENSKRWNPEIQYTNNYNDPQFVDFAPDSTGEYRTTRPIGTRYLTRPL

SEQ ID NO: 2 - DNA, 2175 bp, Artificial Sequence
  synthetic sequence
atgtcttttgttgatcaccctccagattggttggaagaagttggtgaaggtctacgcgagtttttgggccttgatgcgggcccaccgaaaccaaaacccaatcagcagcatcaagatcaagcccgtggtcttgtgctgcctggttataactatctcggacccggaaacgggctcgatcgaggagagcctgtcaacagggcagacgaggtcgcgcgagagcacgacatctcgtacaacgagcagcttgaggcgggagacaacccctacctcaagtacaaccacgcggacgccgagtttcaggagaagctcgccgacgacacatccttcgggggaaacctcggaaaggcagtctttcaggccaagaaaagggttctcgaaccttttggcctggttgaagagggtgctaagacggcccctaccggaaagcggatagacgaccactttccaaaaagaaagaaggctcggaccgaagaggactccaagccttccacctcgtcagacgccgaagctggacccagcggatcccagcagctgcaaatcccagcccaaccagcctcaagtttgggagctgatacaatgtctgcgggaggtggcggcccattgggcgacaataaccaaggtgccgatggagtgggcaatgcctcgggagattggcattgcgattccacgtggatgggggacagagtcgtcaccaagtccacccgaacctgggtgctgcccagctacaacaaccaccagtaccgagagatcaaaagcggctccgtcgacggaagcaacgccaacgcctactttggatacagcaccccctgggggtactttgactttaaccgcttccacagccactggagcccccgagactggcaaagactcatcaacaactactggggcttcagaccccggtccctcagagtcaaaatcttcaacattcaagtcaaagaggtcacggtgcaggactccaccaccaccatcgccaacaacctcacctccaccgtccaagtgtttacggacgacgactaccagctgccctacgtcgtcggcaacgggaccgagggatgcctgccggccttccctccgcaggtctttacgctgccgcagtacggttacgcgacgctgaaccgcgacaacacagaaaatcccaccgagaggagcagcttcttctgcctagagtactttcccagcaagatgctgagaacgggcaacaactttgagtttacctacaactttgaggaggtgcccttccactccagcttcgctcccagtcagaacctgttcaagctggccaacccgctggtggaccagtacttgtaccgcttcgtgagcacaaataacactggcggagtccagttcaacaagaacctggccgggagatacgccaacacctacaaaaactggttcccggggcccatgggccgaacccagggctggaacctgggctccggggtcaaccgcgccagtgtcagcgccttcgccacgaccaataggatggagctcgagggcgcgagttaccaggtgcccccgcagccgaacggcatgaccaacaacctccagggcagcaacacctatgccctggagaacactatgatcttcaacagccagccggcgaacccgggcaccaccgccacgtacctcgagggcaacatgctcatcaccagcgagagcgagacacagccggtgaaccgcgtggcgtacaacgtcggcgggcagatggccaccaacaaccagagctccaccactgcccccgcgaccggcacgtacaacctccaggaaatcgtgcccggcagcgtgtggatggagagggacgtgtacctccaaggacccatctgggccaagatcccagagacaggggcgcactttcacccctctccggccatgggcggattcggactcaaacacccaccgcccatgatgctcatcaagaacacgcctgtgcccggaaatatcaccagcttctcggacgtgcccgtcagcagcttcatcacccagtacagcaccgggcaggtcaccgtggagatggagtgggagctcaagaaggaaaactccaagaggtggaacccagagatccagtacacaaacaactacaacgacccccagtttgtggactttgccccggacagcaccggggaatacagaaccaccagacctatcggaacccgataccttacccgacccctttaa

SEQ ID NO: 3 - protein, 119 aa, Artificial Sequence
  synthetic sequence
MRAHRNQNPISSIKIKPVVLCCLVITISDPETGSIEESLSTGQTRSRESTTSRTTSSLRRETTPTSSTTTRTPSFRRSSPTTHPSGETSERQSFRPRKGFSNLLAWLKRVLRRPLPESG

SEQ ID NO: 4 - DNA, 360 bp, Artificial Sequence
  synthetic sequence
atgcgggcccaccgaaaccaaaacccaatcagcagcatcaagatcaagcccgtggtcttgtgctgcctggttataactatctcggacccggaaacgggctcgatcgaggagagcctgtcaacagggcagacgaggtcgcgcgagagcacgacatctcgtacaacgagcagcttgaggcgggagacaacccctacctcaagtacaaccacgcggacgccgagtttcaggagaagctcgccgacgacacatccttcgggggaaacctcggaaaggcagtctttcaggccaagaaaagggttctcgaaccttttggcctggttgaagagggtgctaagacggcccctaccggaaagcggatag

SEQ ID NO: 5 - protein, 724 aa, Artificial Sequence
  synthetic sequence
MSFVDHPPDWLEEVGEGLREFLGLHAGPPKIKPNQQHQDQARGLVLPGYNYLGPGNGLDRGEPVNRADEVAREHDISYNEQLEAGDNPYLKYNHADAEFQEKLADDTSFGGNLGKAVFQAKKRVLEPFGLVEEGAKTAPTGKRIDDHFPKRKKARTEEDSKPSTSSDAEAGPSGSQQLQIPAQPASSLGADTMSAGGGGPLGDNNQGADGVGNASGDWHCDSTWMGDRVVTKSTRTWVLPSYNNHQYREIKSGSVDGSNANAYFGYSTPWGYFDFNRFHSHWSPRDWQRLINNYWGFRPRSLRVKIFNIQVKEVTVQDSTTTIANNLTSTVQVFTDDDYQLPYVVGNGTEGCLPAFPPQVFTLPQYGYATLNRDNTENPTERSSFFCLEYFPSKMLRTGNNFEFTYNFEEVPFHSSFAPSQNLFKLANPLVDQYLYRFVSTNNTGGVQFNKNLAGRYANTYKNWFPGPMGRTQGWNLGSGVNRASVSAFATTNRMELEGASYQVPPQPNGMTNNLQGSNTYALENTMIFNSQPANPGTTATYLEGNMLITSESETQPVNRVAYNVGGQMATNNQSSTTAPATGTYNLQEIVPGSVWMERDVYLQGPIWAKIPETGAHFHPSPAMGGFGLKHPPPMMLIKNTPVPGNITSFSDVPVSSFITQYSTGQVTVEMEWELKKENSKRWNPEIQYTNNYNDPQFVDFAPDSTGEYRTTRPIGTRYLTRPL

SEQ ID NO: 6 - DNA, 2175 bp, Artificial Sequence
  synthetic sequence
atgtcttttgttgatcaccctccagattggttggaagaagttggtgaaggccttcgcgagtttttgggccttcatgcgggcccaccgaaaattaaacccaatcagcagcatcaagatcaagcccgtggtcttgtgctgcctggttataactatctcggacccggaaacgggctcgatcgaggagagcctgtcaacagggcagacgaggtcgcgcgagagcacgacatctcgtacaacgagcagcttgaggcgggagacaacccctacctcaagtacaaccacgcggacgccgagtttcaggagaagctcgccgacgacacatccttcgggggaaacctcggaaaggcagtctttcaggccaagaaaagggttctcgaaccttttggcctggttgaagagggtgctaagacggcccctaccggaaagcggatagacgaccactttccaaaaagaaagaaggctcggaccgaagaggactccaagccttccacctcgtcagacgccgaagctggacccagcggatcccagcagctgcaaatcccagcccaaccagcctcaagtttgggagctgatacaatgtctgcgggaggtggcggcccattgggcgacaataaccaaggtgccgatggagtgggcaatgcctcgggagattggcattgcgattccacgtggatgggggacagagtcgtcaccaagtccacccgaacctgggtgctgcccagctacaacaaccaccagtaccgagagatcaaaagcggctccgtcgacggaagcaacgccaacgcctactttggatacagcaccccctgggggtactttgactttaaccgcttccacagccactggagcccccgagactggcaaagactcatcaacaactactggggcttcagaccccggtccctcagagtcaaaatcttcaacattcaagtcaaagaggtcacggtgcaggactccaccaccaccatcgccaacaacctcacctccaccgtccaagtgtttacggacgacgactaccagctgccctacgtcgtcggcaacgggaccgagggatgcctgccggccttccctccgcaggtctttacgctgccgcagtacggttacgcgacgctgaaccgcgacaacacagaaaatcccaccgagaggagcagcttcttctgcctagagtactttcccagcaagatgctgagaacgggcaacaactttgagtttacctacaactttgaggaggtgcccttccactccagcttcgctcccagtcagaacctgttcaagctggccaacccgctggtggaccagtacttgtaccgcttcgtgagcacaaataacactggcggagtccagttcaacaagaacctggccgggagatacgccaacacctacaaaaactggttcccggggcccatgggccgaacccagggctggaacctgggctccggggtcaaccgcgccagtgtcagcgccttcgccacgaccaataggatggagctcgagggcgcgagttaccaggtgcccccgcagccgaacggcatgaccaacaacctccagggcagcaacacctatgccctggagaacactatgatcttcaacagccagccggcgaacccgggcaccaccgccacgtacctcgagggcaacatgctcatcaccagcgagagcgagacacagccggtgaaccgcgtggcgtacaacgtcggcgggcagatggccaccaacaaccagagctccaccactgcccccgcgaccggcacgtacaacctccaggaaatcgtgcccggcagcgtgtggatggagagggacgtgtacctccaaggacccatctgggccaagatcccagagacaggggcgcactttcacccctctccggccatgggcggattcggactcaaacacccaccgcccatgatgctcatcaagaacacgcctgtgcccggaaatatcaccagcttctcggacgtgcccgtcagcagcttcatcacccagtacagcaccgggcaggtcaccgtggagatggagtgggagctcaagaaggaaaactccaagaggtggaacccagagatccagtacacaaacaactacaacgacccccagtttgtggactttgccccggacagcaccggggaatacagaaccaccagacctatcggaacccgataccttacccgacccctttaa

SEQ ID NO: 7 - protein, 119 aa, Artificial Sequence
  synthetic sequence
MRAHRKLNPISSIKIKPVVLCCLVITISDPETGSIEESLSTGQTRSRESTTSRTTSSLRRETTPTSSTTTRTPSFRRSSPTTHPSGETSERQSFRPRKGFSNLLAWLKRVLRRPLPESG

SEQ ID NO: 8 - DNA, 360 bp, Artificial Sequence
  synthetic sequence
atgcgggcccaccgaaaattaaacccaatcagcagcatcaagatcaagcccgtggtcttgtgctgcctggttataactatctcggacccggaaacgggctcgatcgaggagagcctgtcaacagggcagacgaggtcgcgcgagagcacgacatctcgtacaacgagcagcttgaggcgggagacaacccctacctcaagtacaaccacgcggacgccgagtttcaggagaagctcgccgacgacacatccttcgggggaaacctcggaaaggcagtctttcaggccaagaaaagggttctcgaaccttttggcctggttgaagagggtgctaagacggcccctaccggaaagcggatag

SEQ ID NO: 9 - protein, 725 aa, Artificial Sequence
  synthetic sequence
MSFVDHPPDWLEEVGEGLREFLGLEAGPPKPKPNQQHQSTNARGLVLPGYKYLGPGNGLDRGPPVNRADEVAREHDISYNEQLEAGDNPYLKYNHADAEFQEKLADDTSFGGNLGKAVFQAKKRVLEPFGLVEEGAKTAPTGKRIDDHFPKRKKARTEEDSKPSTSSDAEAGPSGSQQLQIPAQPASSLGADTMSAGGGGPLGDNNQGADGVGNASGDWHCDSTWMGDRVVTKSTRTWVLPSYNNHQYREIKSGSVDGSNANAYFGYSTPWGYFDFNRFHSHWSPRDWQRLINNYWGFRPRSLRVKIFNIQVKEVTVQDSTTTIANNLTSTVQVFTDDDYQLPYVVGNGTEGCLPAFPPQVFTLPQYGYATLNRDNTENPTERSSFFCLEYFPSKMLRTGNNFEFTYNFEEVPFHSSFAPSQNLFKLANPLVDQYLYRFVSTNNTGGVQFNKNLAGRYANTYKNWFPGPMGRTQGWNLGSGVNRASVSAFATTNRMELEGASYQVPPQPNGMTNNLQGSNTYALENTMIFNSQPANPGTTATYLEGNMLITSESETQPVNRVAYNVGGQMATNNQSSTTAPATGTYNLQEIVPGSVWMERDVYLQGPIWAKIPETGAHFHPSPAMGGFGLKHPPPMMLIKNTPVPGNITSFSDVPVSSFITQYSTGQVTVEMEWELKKENSKRWNPEIQYTNNYNDPQFVDFAPDSTGEYRTTRPIGTRYLTRPL

SEQ ID NO: 10 - DNA, 2178 bp, Artificial Sequence
  synthetic sequence
atgtcttttgttgatcaccctccagattggttggaagaagttggtgaaggtcttcgcgagtttttgggccttgaagcgggcccaccgaaaccaaaacccaatcagcagcatcaatcgacaaatgcccgtggtcttgtgctgcctggttataaatatctcggacccggaaacgggctcgatcgaggaccacctgtcaacagggcagacgaggtcgcgcgagagcacgacatctcgtacaacgagcagcttgaggcgggagacaacccctacctcaagtacaaccacgcggacgccgagtttcaggagaagctcgccgacgacacatccttcgggggaaacctcggaaaggcagtctttcaggccaagaaaagggttctcgaaccttttggcctggttgaagagggtgctaagacggcccctaccggaaagcggatagacgaccactttccaaaaagaaagaaggctcggaccgaagaggactccaagccttccacctcgtcagacgccgaagctggacccagcggatcccagcagctgcaaatcccagcccaaccagcctcaagtttgggagctgatacaatgtctgcgggaggtggcggcccattgggcgacaataaccaaggtgccgatggagtgggcaatgcctcgggagattggcattgcgattccacgtggatgggggacagagtcgtcaccaagtccacccgaacctgggtgctgcccagctacaacaaccaccagtaccgagagatcaaaagcggctccgtcgacggaagcaacgccaacgcctactttggatacagcaccccctgggggtactttgactttaaccgcttccacagccactggagcccccgagactggcaaagactcatcaacaactactggggcttcagaccccggtccctcagagtcaaaatcttcaacattcaagtcaaagaggtcacggtgcaggactccaccaccaccatcgccaacaacctcacctccaccgtccaagtgtttacggacgacgactaccagctgccctacgtcgtcggcaacgggaccgagggatgcctgccggccttccctccgcaggtctttacgctgccgcagtacggttacgcgacgctgaaccgcgacaacacagaaaatcccaccgagaggagcagcttcttctgcctagagtactttcccagcaagatgctgagaacgggcaacaactttgagtttacctacaactttgaggaggtgcccttccactccagcttcgctcccagtcagaacctgttcaagctggccaacccgctggtggaccagtacttgtaccgcttcgtgagcacaaataacactggcggagtccagttcaacaagaacctggccgggagatacgccaacacctacaaaaactggttcccggggcccatgggccgaacccagggctggaacctgggctccggggtcaaccgcgccagtgtcagcgccttcgccacgaccaataggatggagctcgagggcgcgagttaccaggtgcccccgcagccgaacggcatgaccaacaacctccagggcagcaacacctatgccctggagaacactatgatcttcaacagccagccggcgaacccgggcaccaccgccacgtacctcgagggcaacatgctcatcaccagcgagagcgagacacagccggtgaaccgcgtggcgtacaacgtcggcgggcagatggccaccaacaaccagagctccaccactgcccccgcgaccggcacgtacaacctccaggaaatcgtgcccggcagcgtgtggatggagagggacgtgtacctccaaggacccatctgggccaagatcccagagacaggggcgcactttcacccctctccggccatgggcggattcggactcaaacacccaccgcccatgatgctcatcaagaacacgcctgtgcccggaaatatcaccagcttctcggacgtgcccgtcagcagcttcatcacccagtacagcaccgggcaggtcaccgtggagatggagtgggagctcaagaaggaaaactccaagaggtggaacccagagatccagtacacaaacaactacaacgacccccagtttgtggactttgccccggacagcaccggggaatacagaaccaccagacctatcggaacccgataccttacccgacccctttaa

SEQ ID NO: 11 - protein, 104 aa, Artificial Sequence
  synthetic sequence
MPVVLCCLVINISDPETGSIEDHLSTGQTRSRESTTSRTTSSLRRETTPTSSTTTRTPSFRRSSPTTHPSGETSERQSFRPRKGFSNLLAWLKRVLRRPLPESG

SEQ ID NO: 12 - DNA, 315 bp, Artificial Sequence
  synthetic sequence
atgcccgtggtcttgtgctgcctggttataaatatctcggacccggaaacgggctcgatcgaggaccacctgtcaacagggcagacgaggtcgcgcgagagcacgacatctcgtacaacgagcagcttgaggcgggagacaacccctacctcaagtacaaccacgcggacgccgagtttcaggagaagctcgccgacgacacatccttcgggggaaacctcggaaaggcagtctttcaggccaagaaaagggttctcgaaccttttggcctggttgaagagggtgctaagacggcccctaccggaaagcggatag

SEQ ID NO: 13 - protein, 724 aa, Artificial Sequence
  synthetic sequence
MSFVDHPPDWLEEVGNGLREFLGLEAGPPKPKPNQQHQDQARGLVLPGYNYLGPGNGLDRGEPVNRADEVAREHDISYNEQLEAGDNPYLKYNHADAEFQEKLADDTSFGGNLGKAVFQAKKRVLEPFGLVEEGAKTAPTGKRIDDHFPKRKKARTEEDSKPSTSSDAEAGPSGSQQLQIPAQPASSLGADTMSAGGGGPLGDNNQGADGVGNASGDWHCDSTWMGDRVVTKSTRTWVLPSYNNHQYREIKSGSVDGSNANAYFGYSTPWGYFDFNRFHSHWSPRDWQRLINNYWGFRPRSLRVKIFNIQVKEVTVQDSTTTIANNLTSTVQVFTDDDYQLPYVVGNGTEGCLPAFPPQVFTLPQYGYATLNRDNTENPTERSSFFCLEYFPSKMLRTGNNFEFTYNFEEVPFHSSFAPSQNLFKLANPLVDQYLYRFVSTNNTGGVQFNKNLAGRYANTYKNWFPGPMGRTQGWNLGSGVNRASVSAFATTNRMELEGASYQVPPQPNGMTNNLQGSNTYALENTMIFNSQPANPGTTATYLEGNMLITSESETQPVNRVAYNVGGQMATNNQSSTTAPATGTYNLQEIVPGSVWMERDVYLQGPIWAKIPETGAHFHPSPAMGGFGLKHPPPMMLIKNTPVPGNITSFSDVPVSSFITQYSTGQVTVEMEWELKKENSKRWNPEIQYTNNYNDPQFVDFAPDSTGEYRTTRPIGTRYLTRPL

SEQ ID NO: 14 - DNA, 2175 bp, Artificial Sequence
  synthetic sequence
atgtcttttgttgatcaccctccagattggttggaagaagttggtaatggtctgcgcgagtttttgggccttgaagcgggcccaccgaaaccaaaacccaatcagcagcatcaagatcaagcccgtggtcttgtgctgcctggttataactatctcggacccggaaacgggctcgatcgaggagagcctgtcaacagggcagacgaggtcgcgcgagagcacgacatctcgtacaacgagcagcttgaggcgggagacaacccctacctcaagtacaaccacgcggacgccgagtttcaggagaagctcgccgacgacacatccttcgggggaaacctcggaaaggcagtctttcaggccaagaaaagggttctcgaaccttttggcctggttgaagagggtgctaagacggcccctaccggaaagcggatagacgaccactttccaaaaagaaagaaggctcggaccgaagaggactccaagccttccacctcgtcagacgccgaagctggacccagcggatcccagcagctgcaaatcccagcccaaccagcctcaagtttgggagctgatacaatgtctgcgggaggtggcggcccattgggcgacaataaccaaggtgccgatggagtgggcaatgcctcgggagattggcattgcgattccacgtggatgggggacagagtcgtcaccaagtccacccgaacctgggtgctgcccagctacaacaaccaccagtaccgagagatcaaaagcggctccgtcgacggaagcaacgccaacgcctactttggatacagcaccccctgggggtactttgactttaaccgcttccacagccactggagcccccgagactggcaaagactcatcaacaactactggggcttcagaccccggtccctcagagtcaaaatcttcaacattcaagtcaaagaggtcacggtgcaggactccaccaccaccatcgccaacaacctcacctccaccgtccaagtgtttacggacgacgactaccagctgccctacgtcgtcggcaacgggaccgagggatgcctgccggccttccctccgcaggtctttacgctgccgcagtacggttacgcgacgctgaaccgcgacaacacagaaaatcccaccgagaggagcagcttcttctgcctagagtactttcccagcaagatgctgagaacgggcaacaactttgagtttacctacaactttgaggaggtgcccttccactccagcttcgctcccagtcagaacctgttcaagctggccaacccgctggtggaccagtacttgtaccgcttcgtgagcacaaataacactggcggagtccagttcaacaagaacctggccgggagatacgccaacacctacaaaaactggttcccggggcccatgggccgaacccagggctggaacctgggctccggggtcaaccgcgccagtgtcagcgccttcgccacgaccaataggatggagctcgagggcgcgagttaccaggtgcccccgcagccgaacggcatgaccaacaacctccagggcagcaacacctatgccctggagaacactatgatcttcaacagccagccggcgaacccgggcaccaccgccacgtacctcgagggcaacatgctcatcaccagcgagagcgagacacagccggtgaaccgcgtggcgtacaacgtcggcgggcagatggccaccaacaaccagagctccaccactgcccccgcgaccggcacgtacaacctccaggaaatcgtgcccggcagcgtgtggatggagagggacgtgtacctccaaggacccatctgggccaagatcccagagacaggggcgcactttcacccctctccggccatgggcggattcggactcaaacacccaccgcccatgatgctcatcaagaacacgcctgtgcccggaaatatcaccagcttctcggacgtgcccgtcagcagcttcatcacccagtacagcaccgggcaggtcaccgtggagatggagtgggagctcaagaaggaaaactccaagaggtggaacccagagatccagtacacaaacaactacaacgacccccagtttgtggactttgccccggacagcaccggggaatacagaaccaccagacctatcggaacccgataccttacccgacccctttaa

SEQ ID NO: 15 - protein, 128 aa, Artificial Sequence
  synthetic sequence
MVCASFWALKRAHRNQNPISSIKIKPVVLCCLVITISDPETGSIEESLSTGQTRSRESTTSRTTSSLRRETTPTSSTTTRTPSFRRSSPTTHPSGETSERQSFRPRKGFSNLLAWLKRVLRRPLPESG

SEQ ID NO: 16 - DNA, 387 bp, Artificial Sequence
  synthetic sequence
atggtctgcgcgagtttttgggccttgaagcgggcccaccgaaaccaaaacccaatcagcagcatcaagatcaagcccgtggtcttgtgctgcctggttataactatctcggacccggaaacgggctcgatcgaggagagcctgtcaacagggcagacgaggtcgcgcgagagcacgacatctcgtacaacgagcagcttgaggcgggagacaacccctacctcaagtacaaccacgcggacgccgagtttcaggagaagctcgccgacgacacatccttcgggggaaacctcggaaaggcagtctttcaggccaagaaaagggttctcgaaccttttggcctggttgaagagggtgctaagacggcccctaccggaaagcggatag

SEQ ID NO: 17 - protein, 724 aa, Artificial Sequence
  synthetic sequence
MSFVDHPPDWLEEVGEGLDEFLGLEAGPPKPKPNQQHQDQARGLVLPGYNYLGPGNGLDRGEPVNRADEVAREHDISYNEQLEAGDNPYLKYNHADAEFQEKLADDTSFGGNLGKAVFQAKKRVLEPFGLVEEGAKTAPTGKRIDDHFPKRKKARTEEDSKPSTSSDAEAGPSGSQQLQIPAQPASSLGADTMSAGGGGPLGDNNQGADGVGNASGDWHCDSTWMGDRVVTKSTRTWVLPSYNNHQYREIKSGSVDGSNANAYFGYSTPWGYFDFNRFHSHWSPRDWQRLINNYWGFRPRSLRVKIFNIQVKEVTVQDSTTTIANNLTSTVQVFTDDDYQLPYVVGNGTEGCLPAFPPQVFTLPQYGYATLNRDNTENPTERSSFFCLEYFPSKMLRTGNNFEFTYNFEEVPFHSSFAPSQNLFKLANPLVDQYLYRFVSTNNTGGVQFNKNLAGRYANTYKNWFPGPMGRTQGWNLGSGVNRASVSAFATTNRMELEGASYQVPPQPNGMTNNLQGSNTYALENTMIFNSQPANPGTTATYLEGNMLITSESETQPVNRVAYNVGGQMATNNQSSTTAPATGTYNLQEIVPGSVWMERDVYLQGPIWAKIPETGAHFHPSPAMGGFGLKHPPPMMLIKNTPVPGNITSFSDVPVSSFITQYSTGQVTVEMEWELKKENSKRWNPEIQYTNNYNDPQFVDFAPDSTGEYRTTRPIGTRYLTRPL

SEQ ID NO: 18 - DNA, 2175 bp, Artificial Sequence
  synthetic sequence
atgtcttttgttgatcaccctccagattggttggaagaagttggtgaaggtcttgatgagtttttgggccttgaagcgggcccaccgaaaccaaaacccaatcagcagcatcaagatcaagcccgtggtcttgtgctgcctggttataactatctcggacccggaaacgggctcgatcgaggagagcctgtcaacagggcagacgaggtcgcgcgagagcacgacatctcgtacaacgagcagcttgaggcgggagacaacccctacctcaagtacaaccacgcggacgccgagtttcaggagaagctcgccgacgacacatccttcgggggaaacctcggaaaggcagtctttcaggccaagaaaagggttctcgaaccttttggcctggttgaagagggtgctaagacggcccctaccggaaagcggatagacgaccactttccaaaaagaaagaaggctcggaccgaagaggactccaagccttccacctcgtcagacgccgaagctggacccagcggatcccagcagctgcaaatcccagcccaaccagcctcaagtttgggagctgatacaatgtctgcgggaggtggcggcccattgggcgacaataaccaaggtgccgatggagtgggcaatgcctcgggagattggcattgcgattccacgtggatgggggacagagtcgtcaccaagtccacccgaacctgggtgctgcccagctacaacaaccaccagtaccgagagatcaaaagcggctccgtcgacggaagcaacgccaacgcctactttggatacagcaccccctgggggtactttgactttaaccgcttccacagccactggagcccccgagactggcaaagactcatcaacaactactggggcttcagaccccggtccctcagagtcaaaatcttcaacattcaagtcaaagaggtcacggtgcaggactccaccaccaccatcgccaacaacctcacctccaccgtccaagtgtttacggacgacgactaccagctgccctacgtcgtcggcaacgggaccgagggatgcctgccggccttccctccgcaggtctttacgctgccgcagtacggttacgcgacgctgaaccgcgacaacacagaaaatcccaccgagaggagcagcttcttctgcctagagtactttcccagcaagatgctgagaacgggcaacaactttgagtttacctacaactttgaggaggtgcccttccactccagcttcgctcccagtcagaacctgttcaagctggccaacccgctggtggaccagtacttgtaccgcttcgtgagcacaaataacactggcggagtccagttcaacaagaacctggccgggagatacgccaacacctacaaaaactggttcccggggcccatgggccgaacccagggctggaacctgggctccggggtcaaccgcgccagtgtcagcgccttcgccacgaccaataggatggagctcgagggcgcgagttaccaggtgcccccgcagccgaacggcatgaccaacaacctccagggcagcaacacctatgccctggagaacactatgatcttcaacagccagccggcgaacccgggcaccaccgccacgtacctcgagggcaacatgctcatcaccagcgagagcgagacacagccggtgaaccgcgtggcgtacaacgtcggcgggcagatggccaccaacaaccagagctccaccactgcccccgcgaccggcacgtacaacctccaggaaatcgtgcccggcagcgtgtggatggagagggacgtgtacctccaaggacccatctgggccaagatcccagagacaggggcgcactttcacccctctccggccatgggcggattcggactcaaacacccaccgcccatgatgctcatcaagaacacgcctgtgcccggaaatatcaccagcttctcggacgtgcccgtcagcagcttcatcacccagtacagcaccgggcaggtcaccgtggagatggagtgggagctcaagaaggaaaactccaagaggtggaacccagagatccagtacacaaacaactacaacgacccccagtttgtggactttgccccggacagcaccggggaatacagaaccaccagacctatcggaacccgataccttacccgacccctttaa

SEQ ID NO: 19 - protein, 125 aa, Artificial Sequence
  synthetic sequence
MSFWALKRAHRNQNPISSIKIKPVVLCCLVITISDPETGSIEESLSTGQTRSRESTTSRTTSSLRRETTPTSSTTTRTPSFRRSSPTTHPSGETSERQSFRPRKGFSNLLAWLKRVLRRPLPESG

SEQ ID NO: 20 - DNA, 378 bp, Artificial Sequence
  synthetic sequence
atgagtttttgggccttgaagcgggcccaccgaaaccaaaacccaatcagcagcatcaagatcaagcccgtggtcttgtgctgcctggttataactatctcggacccggaaacgggctcgatcgaggagagcctgtcaacagggcagacgaggtcgcgcgagagcacgacatctcgtacaacgagcagcttgaggcgggagacaacccctacctcaagtacaaccacgcggacgccgagtttcaggagaagctcgccgacgacacatccttcgggggaaacctcggaaaggcagtctttcaggccaagaaaagggttctcgaaccttttggcctggttgaagagggtgctaagacggcccctaccggaaagcggatag

SEQ ID NO: 21 - protein, 724 aa, Artificial Sequence
  synthetic sequence
MSFVDHPPDWLEEVYEGLREFLGLEAGPPKPKPNQQHQDQARGLVLPGYNYLGPGNGLDRGEPVNRADEVAREHDISYNEQLEAGDNPYLKYNHADAEFQEKLADDTSFGGNLGKAVFQAKKRVLEPFGLVEEGAKTAPTGKRIDDHFPKRKKARTEEDSKPSTSSDAEAGPSGSQQLQIPAQPASSLGADTMSAGGGGPLGDNNQGADGVGNASGDWHCDSTWMGDRVVTKSTRTWVLPSYNNHQYREIKSGSVDGSNANAYFGYSTPWGYFDFNRFHSHWSPRDWQRLINNYWGFRPRSLRVKIFNIQVKEVTVQDSTTTIANNLTSTVQVFTDDDYQLPYVVGNGTEGCLPAFPPQVFTLPQYGYATLNRDNTENPTERSSFFCLEYFPSKMLRTGNNFEFTYNFEEVPFHSSFAPSQNLFKLANPLVDQYLYRFVSTNNTGGVQFNKNLAGRYANTYKNWFPGPMGRTQGWNLGSGVNRASVSAFATTNRMELEGASYQVPPQPNGMTNNLQGSNTYALENTMIFNSQPANPGTTATYLEGNMLITSESETQPVNRVAYNVGGQMATNNQSSTTAPATGTYNLQEIVPGSVWMERDVYLQGPIWAKIPETGAHFHPSPAMGGFGLKHPPPMMLIKNTPVPGNITSFSDVPVSSFITQYSTGQVTVEMEWELKKENSKRWNPEIQYTNNYNDPQFVDFAPDSTGEYRTTRPIGTRYLTRPL

SEQ ID NO: 22 - DNA, 2175 bp, Artificial Sequence
  synthetic sequence
atgtcttttgttgatcaccctccagattggttggaagaagtttatgaaggtctgcgcgagtttttgggccttgaagcgggcccaccgaaaccaaaacccaatcagcagcatcaagatcaagcccgtggtcttgtgctgcctggttataactatctcggacccggaaacgggctcgatcgaggagagcctgtcaacagggcagacgaggtcgcgcgagagcacgacatctcgtacaacgagcagcttgaggcgggagacaacccctacctcaagtacaaccacgcggacgccgagtttcaggagaagctcgccgacgacacatccttcgggggaaacctcggaaaggcagtctttcaggccaagaaaagggttctcgaaccttttggcctggttgaagagggtgctaagacggcccctaccggaaagcggatagacgaccactttccaaaaagaaagaaggctcggaccgaagaggactccaagccttccacctcgtcagacgccgaagctggacccagcggatcccagcagctgcaaatcccagcccaaccagcctcaagtttgggagctgatacaatgtctgcgggaggtggcggcccattgggcgacaataaccaaggtgccgatggagtgggcaatgcctcgggagattggcattgcgattccacgtggatgggggacagagtcgtcaccaagtccacccgaacctgggtgctgcccagctacaacaaccaccagtaccgagagatcaaaagcggctccgtcgacggaagcaacgccaacgcctactttggatacagcaccccctgggggtactttgactttaaccgcttccacagccactggagcccccgagactggcaaagactcatcaacaactactggggcttcagaccccggtccctcagagtcaaaatcttcaacattcaagtcaaagaggtcacggtgcaggactccaccaccaccatcgccaacaacctcacctccaccgtccaagtgtttacggacgacgactaccagctgccctacgtcgtcggcaacgggaccgagggatgcctgccggccttccctccgcaggtctttacgctgccgcagtacggttacgcgacgctgaaccgcgacaacacagaaaatcccaccgagaggagcagcttcttctgcctagagtactttcccagcaagatgctgagaacgggcaacaactttgagtttacctacaactttgaggaggtgcccttccactccagcttcgctcccagtcagaacctgttcaagctggccaacccgctggtggaccagtacttgtaccgcttcgtgagcacaaataacactggcggagtccagttcaacaagaacctggccgggagatacgccaacacctacaaaaactggttcccggggcccatgggccgaacccagggctggaacctgggctccggggtcaaccgcgccagtgtcagcgccttcgccacgaccaataggatggagctcgagggcgcgagttaccaggtgcccccgcagccgaacggcatgaccaacaacctccagggcagcaacacctatgccctggagaacactatgatcttcaacagccagccggcgaacccgggcaccaccgccacgtacctcgagggcaacatgctcatcaccagcgagagcgagacacagccggtgaaccgcgtggcgtacaacgtcggcgggcagatggccaccaacaaccagagctccaccactgcccccgcgaccggcacgtacaacctccaggaaatcgtgcccggcagcgtgtggatggagagggacgtgtacctccaaggacccatctgggccaagatcccagagacaggggcgcactttcacccctctccggccatgggcggattcggactcaaacacccaccgcccatgatgctcatcaagaacacgcctgtgcccggaaatatcaccagcttctcggacgtgcccgtcagcagcttcatcacccagtacagcaccgggcaggtcaccgtggagatggagtgggagctcaagaaggaaaactccaagaggtggaacccagagatccagtacacaaacaactacaacgacccccagtttgtggactttgccccggacagcaccggggaatacagaaccaccagacctatcggaacccgataccttacccgacccctttaa

SEQ ID NO: 23 - protein, 129 aa, Artificial Sequence
  synthetic sequence
MKVCASFWALKRAHRNQNPISSIKIKPVVLCCLVITISDPETGSIEESLSTGQTRSRESTTSRTTSSLRRETTPTSSTTTRTPSFRRSSPTTHPSGETSERQSFRPRKGFSNLLAWLKRVLRRPLPESG

SEQ ID NO: 24 - DNA, 390 bp, Artificial Sequence
  synthetic sequence
atgaaggtctgcgcgagtttttgggccttgaagcgggcccaccgaaaccaaaacccaatcagcagcatcaagatcaagcccgtggtcttgtgctgcctggttataactatctcggacccggaaacgggctcgatcgaggagagcctgtcaacagggcagacgaggtcgcgcgagagcacgacatctcgtacaacgagcagcttgaggcgggagacaacccctacctcaagtacaaccacgcggacgccgagtttcaggagaagctcgccgacgacacatccttcgggggaaacctcggaaaggcagtctttcaggccaagaaaagggttctcgaaccttttggcctggttgaagagggtgctaagacggcccctaccggaaagcggatag

SEQ ID NO: 25 - protein, 725 aa, Artificial Sequence
  synthetic sequence
MSFVDHPPDWLEEVGEGLREFLGLEAGPPKPKPNQQHSDEQARGLVLPGYNYLGPGNGLDRGEPVNEADEVAREHDISYNEQLEAGDNPYLKYNHADAEFQEKLADDTSFGGNLGKAVFQAKKRVLEPFGLVEEGAKTAPTGKRIDDHFPKRKKARTEEDSKPSTSSDAEAGPSGSQQLQIPAQPASSLGADTMSAGGGGPLGDNNQGADGVGNASGDWHCDSTWMGDRVVTKSTRTWVLPSYNNHQYREIKSGSVDGSNANAYFGYSTPWGYFDFNRFHSHWSPRDWQRLINNYWGFRPRSLRVKIFNIQVKEVTVQDSTTTIANNLTSTVQVFTDDDYQLPYVVGNGTEGCLPAFPPQVFTLPQYGYATLNRDNTENPTERSSFFCLEYFPSKMLRTGNNFEFTYNFEEVPFHSSFAPSQNLFKLANPLVDQYLYRFVSTNNTGGVQFNKNLAGRYANTYKNWFPGPMGRTQGWNLGSGVNRASVSAFATTNRMELEGASYQVPPQPNGMTNNLQGSNTYALENTMIFNSQPANPGTTATYLEGNMLITSESETQPVNRVAYNVGGQMATNNQSSTTAPATGTYNLQEIVPGSVWMERDVYLQGPIWAKIPETGAHFHPSPAMGGFGLKHPPPMMLIKNTPVPGNITSFSDVPVSSFITQYSTGQVTVEMEWELKKENSKRWNPEIQYTNNYNDPQFVDFAPDSTGEYRTTRPIGTRYLTRPL

SEQ ID NO: 26 - DNA, 2178 bp, Artificial Sequence
  synthetic sequence
atgtcttttgttgatcaccctccagattggttggaagaagttggtgaaggtcttcgcgagtttttgggccttgaagcgggcccaccgaaaccaaaacccaatcagcagcattccgatgagcaagcccgtggtcttgtgctgcctggttataactatctcggacccggaaacgggctcgatcgaggagagcctgtcaacgaggcagacgaggtcgcgcgagagcacgacatctcgtacaacgagcagcttgaggcgggagacaacccctacctcaagtacaaccacgcggacgccgagtttcaggagaagctcgccgacgacacatccttcgggggaaacctcggaaaggcagtctttcaggccaagaaaagggttctcgaaccttttggcctggttgaagagggtgctaagacggcccctaccggaaagcggatagacgaccactttccaaaaagaaagaaggctcggaccgaagaggactccaagccttccacctcgtcagacgccgaagctggacccagcggatcccagcagctgcaaatcccagcccaaccagcctcaagtttgggagctgatacaatgtctgcgggaggtggcggcccattgggcgacaataaccaaggtgccgatggagtgggcaatgcctcgggagattggcattgcgattccacgtggatgggggacagagtcgtcaccaagtccacccgaacctgggtgctgcccagctacaacaaccaccagtaccgagagatcaaaagcggctccgtcgacggaagcaacgccaacgcctactttggatacagcaccccctgggggtactttgactttaaccgcttccacagccactggagcccccgagactggcaaagactcatcaacaactactggggcttcagaccccggtccctcagagtcaaaatcttcaacattcaagtcaaagaggtcacggtgcaggactccaccaccaccatcgccaacaacctcacctccaccgtccaagtgtttacggacgacgactaccagctgccctacgtcgtcggcaacgggaccgagggatgcctgccggccttccctccgcaggtctttacgctgccgcagtacggttacgcgacgctgaaccgcgacaacacagaaaatcccaccgagaggagcagcttcttctgcctagagtactttcccagcaagatgctgagaacgggcaacaactttgagtttacctacaactttgaggaggtgcccttccactccagcttcgctcccagtcagaacctgttcaagctggccaacccgctggtggaccagtacttgtaccgcttcgtgagcacaaataacactggcggagtccagttcaacaagaacctggccgggagatacgccaacacctacaaaaactggttcccggggcccatgggccgaacccagggctggaacctgggctccggggtcaaccgcgccagtgtcagcgccttcgccacgaccaataggatggagctcgagggcgcgagttaccaggtgcccccgcagccgaacggcatgaccaacaacctccagggcagcaacacctatgccctggagaacactatgatcttcaacagccagccggcgaacccgggcaccaccgccacgtacctcgagggcaacatgctcatcaccagcgagagcgagacacagccggtgaaccgcgtggcgtacaacgtcggcgggcagatggccaccaacaaccagagctccaccactgcccccgcgaccggcacgtacaacctccaggaaatcgtgcccggcagcgtgtggatggagagggacgtgtacctccaaggacccatctgggccaagatcccagagacaggggcgcactttcacccctctccggccatgggcggattcggactcaaacacccaccgcccatgatgctcatcaagaacacgcctgtgcccggaaatatcaccagcttctcggacgtgcccgtcagcagcttcatcacccagtacagcaccgggcaggtcaccgtggagatggagtgggagctcaagaaggaaaactccaagaggtggaacccagagatccagtacacaaacaactacaacgacccccagtttgtggactttgccccggacagcaccggggaatacagaaccaccagacctatcggaacccgataccttacccgacccctttaa

SEQ ID NO: 27 - protein, 106 aa, Artificial Sequence
  synthetic sequence
MSKPVVLCCLVITISDPETGSIEESLSTRQTRSRESTTSRTTSSLRRETTPTSSTTTRTPSFRRSSPTTHPSGETSERQSFRPRKGFSNLLAWLKRVLRRPLPESG

SEQ ID NO: 28 - DNA, 321 bp, Artificial Sequence
  synthetic sequence
atgagcaagcccgtggtcttgtgctgcctggttataactatctcggacccggaaacgggctcgatcgaggagagcctgtcaacgaggcagacgaggtcgcgcgagagcacgacatctcgtacaacgagcagcttgaggcgggagacaacccctacctcaagtacaaccacgcggacgccgagtttcaggagaagctcgccgacgacacatccttcgggggaaacctcggaaaggcagtctttcaggccaagaaaagggttctcgaaccttttggcctggttgaagagggtgctaagacggcccctaccggaaagcggatag

SEQ ID NO: 29 - protein, 724 aa, Artificial Sequence
  synthetic sequence
MSFVDHPPDWLEEVGEGLFEFYGLEAGFPKPKPNQQHQDQARGLVLPGYNYLGPGNGLDRGEPVNRADEVAREHDISYNEQLEAGDNPYLKYNHADAEFQEKLADDTSFGGNLGKAVFQAKKRVLEPFGLVEEGAKTAPTGKRIDDHFPKRKKARTEEDSKPSTSSDAEAGPSGSQQLQIPAQPASSLGADTMSAGGGGPLGDNNQGADGVGNASGDWHCDSTWMGDRVVTKSTRTWVLPSYNNHQYREIKSGSVDGSNANAYFGYSTPWGYFDFNRFHSHWSPRDWQRLINNYWGFRPRSLRVKIFNIQVKEVTVQDSTTTIANNLTSTVQVFTDDDYQLPYVVGNGTEGCLPAFPPQVFTLPQYGYATLNRDNTENPTERSSFFCLEYFPSKMLRTGNNFEFTYNFEEVPFHSSFAPSQNLFKLANPLVDQYLYRFVSTNNTGGVQFNKNLAGRYANTYKNWFPGPMGRTQGWNLGSGVNRASVSAFATTNRMELEGASYQVPPQPNGMTNNLQGSNTYALENTMIFNSQPANPGTTATYLEGNMLITSESETQPVNRVAYNVGGQMATNNQSSTTAPATGTYNLQEIVPGSVWMERDVYLQGPIWAKIPETGAHFHPSPAMGGFGLKHPPPMMLIKNTPVPGNITSFSDVPVSSFITQYSTGQVTVEMEWELKKENSKRWNPEIQYTNNYNDPQFVDFAPDSTGEYRTTRPIGTRYLTRPL

SEQ ID NO: 30 - DNA, 2175 bp, Artificial Sequence
  synthetic sequence
atgtcttttgttgatcaccctccagattggttggaagaagttggtgaaggtcttttcgagttttatggccttgaagcgggctttccgaaaccaaaacccaatcagcagcatcaagatcaagcccgtggtcttgtgctgcctggttataactatctcggacccggaaacgggctcgatcgaggagagcctgtcaacagggcagacgaggtcgcgcgagagcacgacatctcgtacaacgagcagcttgaggcgggagacaacccctacctcaagtacaaccacgcggacgccgagtttcaggagaagctcgccgacgacacatccttcgggggaaacctcggaaaggcagtctttcaggccaagaaaagggttctcgaaccttttggcctggttgaagagggtgctaagacggcccctaccggaaagcggatagacgaccactttccaaaaagaaagaaggctcggaccgaagaggactccaagccttccacctcgtcagacgccgaagctggacccagcggatcccagcagctgcaaatcccagcccaaccagcctcaagtttgggagctgatacaatgtctgcgggaggtggcggcccattgggcgacaataaccaaggtgccgatggagtgggcaatgcctcgggagattggcattgcgattccacgtggatgggggacagagtcgtcaccaagtccacccgaacctgggtgctgcccagctacaacaaccaccagtaccgagagatcaaaagcggctccgtcgacggaagcaacgccaacgcctactttggatacagcaccccctgggggtactttgactttaaccgcttccacagccactggagcccccgagactggcaaagactcatcaacaactactggggcttcagaccccggtccctcagagtcaaaatcttcaacattcaagtcaaagaggtcacggtgcaggactccaccaccaccatcgccaacaacctcacctccaccgtccaagtgtttacggacgacgactaccagctgccctacgtcgtcggcaacgggaccgagggatgcctgccggccttccctccgcaggtctttacgctgccgcagtacggttacgcgacgctgaaccgcgacaacacagaaaatcccaccgagaggagcagcttcttctgcctagagtactttcccagcaagatgctgagaacgggcaacaactttgagtttacctacaactttgaggaggtgcccttccactccagcttcgctcccagtcagaacctgttcaagctggccaacccgctggtggaccagtacttgtaccgcttcgtgagcacaaataacactggcggagtccagttcaacaagaacctggccgggagatacgccaacacctacaaaaactggttcccggggcccatgggccgaacccagggctggaacctgggctccggggtcaaccgcgccagtgtcagcgccttcgccacgaccaataggatggagctcgagggcgcgagttaccaggtgcccccgcagccgaacggcatgaccaacaacctccagggcagcaacacctatgccctggagaacactatgatcttcaacagccagccggcgaacccgggcaccaccgccacgtacctcgagggcaacatgctcatcaccagcgagagcgagacacagccggtgaaccgcgtggcgtacaacgtcggcgggcagatggccaccaacaaccagagctccaccactgcccccgcgaccggcacgtacaacctccaggaaatcgtgcccggcagcgtgtggatggagagggacgtgtacctccaaggacccatctgggccaagatcccagagacaggggcgcactttcacccctctccggccatgggcggattcggactcaaacacccaccgcccatgatgctcatcaagaacacgcctgtgcccggaaatatcaccagcttctcggacgtgcccgtcagcagcttcatcacccagtacagcaccgggcaggtcaccgtggagatggagtgggagctcaagaaggaaaactccaagaggtggaacccagagatccagtacacaaacaactacaacgacccccagtttgtggactttgccccggacagcaccggggaatacagaaccaccagacctatcggaacccgataccttacccgacccctttaa

SEQ ID NO: 31 - protein, 122 aa, Artificial Sequence
  synthetic sequence
MALKRAFRNQNPISSIKIKPVVLCCLVITISDPETGSIEESLSTGQTRSRESTTSRTTSSLRRETTPTSSTTTRTPSFRRSSPTTHPSGETSERQSFRPRKGFSNLLAWLKRVLRRPLPESG

SEQ ID NO: 32 - DNA, 369 bp, Artificial Sequence
  synthetic sequence
atggccttgaagcgggctttccgaaaccaaaacccaatcagcagcatcaagatcaagcccgtggtcttgtgctgcctggttataactatctcggacccggaaacgggctcgatcgaggagagcctgtcaacagggcagacgaggtcgcgcgagagcacgacatctcgtacaacgagcagcttgaggcgggagacaacccctacctcaagtacaaccacgcggacgccgagtttcaggagaagctcgccgacgacacatccttcgggggaaacctcggaaaggcagtctttcaggccaagaaaagggttctcgaaccttttggcctggttgaagagggtgctaagacggcccctaccggaaagcggatag

SEQ ID NO: 33 - protein, 724 aa, Artificial Sequence
  synthetic sequence
MSFVDHPPDWLEEVGEGLREFLGLEAGPPKPKPNQQHQDQARGLVLPGYNYLGPGNGLDRGEPVNRADEVAREHDISYNEQLDAGDNPYLKYNHADAEFQEKLADDTSFGGNLGKAVFQAKKRVLEPFGLVEEGAKTAPTGKRIDDHFPKRKKARTEEDSKPSTSSDAEAGPSGSQQLQIPAQPASSLGADTMSAGGGGPLGDNNQGADGVGNASGDWHCDSTWMGDRVVTKSTRTWVLPSYNNHQYREIKSGSVDGSNANAYFGYSTPWGYFDFNRFHSHWSPRDWQRLINNYWGFRPRSLRVKIFNIQVKEVTVQDSTTTIANNLTSTVQVFTDDDYQLPYVVGNGTEGCLPAFPPQVFTLPQYGYATLNRDNTENPTERSSFFCLEYFPSKMLRTGNNFEFTYNFEEVPFHSSFAPSQNLFKLANPLVDQYLYRFVSTNNTGGVQFNKNLAGRYANTYKNWFPGPMGRTQGWNLGSGVNRASVSAFATTNRMELEGASYQVPPQPNGMTNNLQGSNTYALENTMIFNSQPANPGTTATYLEGNMLITSESETQPVNRVAYNVGGQMATNNQSSTTAPATGTYNLQEIVPGSVWMERDVYLQGPIWAKIPETGAHFHPSPAMGGFGLKHPPPMMLIKNTPVPGNITSFSDVPVSSFITQYSTGQVTVEMEWELKKENSKRWNPEIQYTNNYNDPQFVDFAPDSTGEYRTTRPIGTRYLTRPL

SEQ ID NO: 34 - DNA, 2175 bp, Artificial Sequence
  synthetic sequence
atgtcttttgttgatcaccctccagattggttggaagaagttggtgaaggtcttcgcgagtttttgggccttgaagcgggcccaccgaaaccaaaacccaatcagcagcatcaagatcaagcccgtggtcttgtgctgcctggttataactatctcggacccggaaacgggctcgatcgaggagagcctgtcaacagggcagacgaggtcgcgcgagagcacgacatctcgtacaacgagcagcttgatgcgggagacaacccctacctcaagtacaaccacgcggacgccgagtttcaggagaagctcgccgacgacacatccttcgggggaaacctcggaaaggcagtctttcaggccaagaaaagggttctcgaaccttttggcctggttgaagagggtgctaagacggcccctaccggaaagcggatagacgaccactttccaaaaagaaagaaggctcggaccgaagaggactccaagccttccacctcgtcagacgccgaagctggacccagcggatcccagcagctgcaaatcccagcccaaccagcctcaagtttgggagctgatacaatgtctgcgggaggtggcggcccattgggcgacaataaccaaggtgccgatggagtgggcaatgcctcgggagattggcattgcgattccacgtggatgggggacagagtcgtcaccaagtccacccgaacctgggtgctgcccagctacaacaaccaccagtaccgagagatcaaaagcggctccgtcgacggaagcaacgccaacgcctactttggatacagcaccccctgggggtactttgactttaaccgcttccacagccactggagcccccgagactggcaaagactcatcaacaactactggggcttcagaccccggtccctcagagtcaaaatcttcaacattcaagtcaaagaggtcacggtgcaggactccaccaccaccatcgccaacaacctcacctccaccgtccaagtgtttacggacgacgactaccagctgccctacgtcgtcggcaacgggaccgagggatgcctgccggccttccctccgcaggtctttacgctgccgcagtacggttacgcgacgctgaaccgcgacaacacagaaaatcccaccgagaggagcagcttcttctgcctagagtactttcccagcaagatgctgagaacgggcaacaactttgagtttacctacaactttgaggaggtgcccttccactccagcttcgctcccagtcagaacctgttcaagctggccaacccgctggtggaccagtacttgtaccgcttcgtgagcacaaataacactggcggagtccagttcaacaagaacctggccgggagatacgccaacacctacaaaaactggttcccggggcccatgggccgaacccagggctggaacctgggctccggggtcaaccgcgccagtgtcagcgccttcgccacgaccaataggatggagctcgagggcgcgagttaccaggtgcccccgcagccgaacggcatgaccaacaacctccagggcagcaacacctatgccctggagaacactatgatcttcaacagccagccggcgaacccgggcaccaccgccacgtacctcgagggcaacatgctcatcaccagcgagagcgagacacagccggtgaaccgcgtggcgtacaacgtcggcgggcagatggccaccaacaaccagagctccaccactgcccccgcgaccggcacgtacaacctccaggaaatcgtgcccggcagcgtgtggatggagagggacgtgtacctccaaggacccatctgggccaagatcccagagacaggggcgcactttcacccctctccggccatgggcggattcggactcaaacacccaccgcccatgatgctcatcaagaacacgcctgtgcccggaaatatcaccagcttctcggacgtgcccgtcagcagcttcatcacccagtacagcaccgggcaggtcaccgtggagatggagtgggagctcaagaaggaaaactccaagaggtggaacccagagatccagtacacaaacaactacaacgacccccagtttgtggactttgccccggacagcaccggggaatacagaaccaccagacctatcggaacccgataccttacccgacccctttaa

SEQ ID NO: 35 - protein, 61 aa, Artificial Sequence
  synthetic sequence
MRETTPTSSTTTRTPSFRRSSPTTHPSGETSERQSFRPRKGFSNLLAWLKRVLRRPLPESG

SEQ ID NO: 36 - DNA, 186 bp, Artificial Sequence
  synthetic sequence
atgcgggagacaacccctacctcaagtacaaccacgcggacgccgagtttcaggagaagctcgccgacgacacatccttcgggggaaacctcggaaaggcagtctttcaggccaagaaaagggttctcgaaccttttggcctggttgaagagggtgctaagacggcccctaccggaaagcggatag

SEQ ID NO: 37 - protein, 724 aa, Artificial Sequence
  synthetic sequence
MSFVDHPPDWLEEVGEGLREFLGLEAGPPKPKPNQQHQDNGRGLVLPGYKYLGPFNGLDKGEPVNEADEVAREHDISYNEQLEAGDNPYLKYNHADAEFQEKLADDTSFGGNLGKAVFQAKKRVLEPFGLVEEGAKTAPTGKRIDDHFPKRKKARTEEDSKPSTSSDAEAGPSGSQQLQIPAQPASSLGADTMSAGGGGPLGDNNQGADGVGNASGDWHCDSTWMGDRVVTKSTRTWVLPSYNNHQYREIKSGSVDGSNANAYFGYSTPWGYFDFNRFHSHWSPRDWQRLINNYWGFRPRSLRVKIFNIQVKEVTVQDSTTTIANNLTSTVQVFTDDDYQLPYVVGNGTEGCLPAFPPQVFTLPQYGYATLNRDNTENPTERSSFFCLEYFPSKMLRTGNNFEFTYNFEEVPFHSSFAPSQNLFKLANPLVDQYLYRFVSTNNTGGVQFNKNLAGRYANTYKNWFPGPMGRTQGWNLGSGVNRASVSAFATTNRMELEGASYQVPPQPNGMTNNLQGSNTYALENTMIFNSQPANPGTTATYLEGNMLITSESETQPVNRVAYNVGGQMATNNQSSTTAPATGTYNLQEIVPGSVWMERDVYLQGPIWAKIPETGAHFHPSPAMGGFGLKHPPPMMLIKNTPVPGNITSFSDVPVSSFITQYSTGQVTVEMEWELKKENSKRWNPEIQYTNNYNDPQFVDFAPDSTGEYRTTRPIGTRYLTRPL

SEQ ID NO: 38 - DNA, 2175 bp, Artificial Sequence
  synthetic sequence
atgtcttttgttgatcaccctccagattggttggaagaagttggtgaaggtcttcgcgagtttttgggccttgaagcgggcccaccgaaaccaaaacccaatcagcagcatcaagataatggacgtggtcttgtgctgcctggttataaatatctcggacccttcaacgggctcgataagggagagcctgtcaacgaagcagacgaggtcgcgcgagagcacgacatctcgtacaacgagcagcttgaggcgggagacaacccctacctcaagtacaaccacgcggacgccgagtttcaggagaagctcgccgacgacacatccttcgggggaaacctcggaaaggcagtctttcaggccaagaaaagggttctcgaaccttttggcctggttgaagagggtgctaagacggcccctaccggaaagcggatagacgaccactttccaaaaagaaagaaggctcggaccgaagaggactccaagccttccacctcgtcagacgccgaagctggacccagcggatcccagcagctgcaaatcccagcccaaccagcctcaagtttgggagctgatacaatgtctgcgggaggtggcggcccattgggcgacaataaccaaggtgccgatggagtgggcaatgcctcgggagattggcattgcgattccacgtggatgggggacagagtcgtcaccaagtccacccgaacctgggtgctgcccagctacaacaaccaccagtaccgagagatcaaaagcggctccgtcgacggaagcaacgccaacgcctactttggatacagcaccccctgggggtactttgactttaaccgcttccacagccactggagcccccgagactggcaaagactcatcaacaactactggggcttcagaccccggtccctcagagtcaaaatcttcaacattcaagtcaaagaggtcacggtgcaggactccaccaccaccatcgccaacaacctcacctccaccgtccaagtgtttacggacgacgactaccagctgccctacgtcgtcggcaacgggaccgagggatgcctgccggccttccctccgcaggtctttacgctgccgcagtacggttacgcgacgctgaaccgcgacaacacagaaaatcccaccgagaggagcagcttcttctgcctagagtactttcccagcaagatgctgagaacgggcaacaactttgagtttacctacaactttgaggaggtgcccttccactccagcttcgctcccagtcagaacctgttcaagctggccaacccgctggtggaccagtacttgtaccgcttcgtgagcacaaataacactggcggagtccagttcaacaagaacctggccgggagatacgccaacacctacaaaaactggttcccggggcccatgggccgaacccagggctggaacctgggctccggggtcaaccgcgccagtgtcagcgccttcgccacgaccaataggatggagctcgagggcgcgagttaccaggtgcccccgcagccgaacggcatgaccaacaacctccagggcagcaacacctatgccctggagaacactatgatcttcaacagccagccggcgaacccgggcaccaccgccacgtacctcgagggcaacatgctcatcaccagcgagagcgagacacagccggtgaaccgcgtggcgtacaacgtcggcgggcagatggccaccaacaaccagagctccaccactgcccccgcgaccggcacgtacaacctccaggaaatcgtgcccggcagcgtgtggatggagagggacgtgtacctccaaggacccatctgggccaagatcccagagacaggggcgcactttcacccctctccggccatgggcggattcggactcaaacacccaccgcccatgatgctcatcaagaacacgcctgtgcccggaaatatcaccagcttctcggacgtgcccgtcagcagcttcatcacccagtacagcaccgggcaggtcaccgtggagatggagtgggagctcaagaaggaaaactccaagaggtggaacccagagatccagtacacaaacaactacaacgacccccagtttgtggactttgccccggacagcaccggggaatacagaaccaccagacctatcggaacccgataccttacccgacccctttaa

SEQ ID NO: 39 - protein, 104 aa, Artificial Sequence
  synthetic sequence
MDVVLCCLVINISDPSTGSIRESLSTKQTRSRESTTSRTTSSLRRETTPTSSTTTRTPSFRRSSPTTHPSGETSERQSFRPRKGFSNLLAWLKRVLRRPLPESG

SEQ ID NO: 40 - DNA, 315 bp, Artificial Sequence
  synthetic sequence
atggacgtggtcttgtgctgcctggttataaatatctcggacccttcaacgggctcgataagggagagcctgtcaacgaagcagacgaggtcgcgcgagagcacgacatctcgtacaacgagcagcttgaggcgggagacaacccctacctcaagtacaaccacgcggacgccgagtttcaggagaagctcgccgacgacacatccttcgggggaaacctcggaaaggcagtctttcaggccaagaaaagggttctcgaaccttttggcctggttgaagagggtgctaagacggcccctaccggaaagcggatag

SEQ ID NO: 41 - protein, 725 aa, Artificial Sequence
  synthetic sequence
MSFVDHPPDWLEEVGEGLREFLGLEAGPPKPKPNEQQHQDQARGLVLPGYNYLGPGNGLDRGEPVNRADEVAREHDISYNEQLEAGDNPYLKYNHADAEFQEKLADDTSFGGNLGKAVFQAKKRVLEPFGLVEEGAKTAPTGKRIDDHFPKRKKARTEEDSKPSTSSDAEAGPSGSQQLQIPAQPASSLGADTMSAGGGGPLGDNNQGADGVGNASGDWHCDSTWMGDRVVTKSTRTWVLPSYNNHQYREIKSGSVDGSNANAYFGYSTPWGYFDFNRFHSHWSPRDWQRLINNYWGFRPRSLRVKIFNIQVKEVTVQDSTTTIANNLTSTVQVFTDDDYQLPYVVGNGTEGCLPAFPPQVFTLPQYGYATLNRDNTENPTERSSFFCLEYFPSKMLRTGNNFEFTYNFEEVPFHSSFAPSQNLFKLANPLVDQYLYRFVSTNNTGGVQFNKNLAGRYANTYKNWFPGPMGRTQGWNLGSGVNRASVSAFATTNRMELEGASYQVPPQPNGMTNNLQGSNTYALENTMIFNSQPANPGTTATYLEGNMLITSESETQPVNRVAYNVGGQMATNNQSSTTAPATGTYNLQEIVPGSVWMERDVYLQGPIWAKIPETGAHFHPSPAMGGFGLKHPPPMMLIKNTPVPGNITSFSDVPVSSFITQYSTGQVTVEMEWELKKENSKRWNPEIQYTNNYNDPQFVDFAPDSTGEYRTTRPIGTRYLTRPL

SEQ ID NO: 42 - DNA, 2178 bp, Artificial Sequence
  synthetic sequence
atgtcttttgttgatcaccctccagattggttggaagaagttggtgaaggtcttcgcgagtttttgggccttgaagcgggcccaccgaaaccaaaacccaatgagcagcagcatcaagatcaagcccgtggtcttgtgctgcctggttataactatctcggacccggaaacgggctcgatcgaggagagcctgtcaacagggcagacgaggtcgcgcgagagcacgacatctcgtacaacgagcagcttgaggcgggagacaacccctacctcaagtacaaccacgcggacgccgagtttcaggagaagctcgccgacgacacatccttcgggggaaacctcggaaaggcagtctttcaggccaagaaaagggttctcgaaccttttggcctggttgaagagggtgctaagacggcccctaccggaaagcggatagacgaccactttccaaaaagaaagaaggctcggaccgaagaggactccaagccttccacctcgtcagacgccgaagctggacccagcggatcccagcagctgcaaatcccagcccaaccagcctcaagtttgggagctgatacaatgtctgcgggaggtggcggcccattgggcgacaataaccaaggtgccgatggagtgggcaatgcctcgggagattggcattgcgattccacgtggatgggggacagagtcgtcaccaagtccacccgaacctgggtgctgcccagctacaacaaccaccagtaccgagagatcaaaagcggctccgtcgacggaagcaacgccaacgcctactttggatacagcaccccctgggggtactttgactttaaccgcttccacagccactggagcccccgagactggcaaagactcatcaacaactactggggcttcagaccccggtccctcagagtcaaaatcttcaacattcaagtcaaagaggtcacggtgcaggactccaccaccaccatcgccaacaacctcacctccaccgtccaagtgtttacggacgacgactaccagctgccctacgtcgtcggcaacgggaccgagggatgcctgccggccttccctccgcaggtctttacgctgccgcagtacggttacgcgacgctgaaccgcgacaacacagaaaatcccaccgagaggagcagcttcttctgcctagagtactttcccagcaagatgctgagaacgggcaacaactttgagtttacctacaactttgaggaggtgcccttccactccagcttcgctcccagtcagaacctgttcaagctggccaacccgctggtggaccagtacttgtaccgcttcgtgagcacaaataacactggcggagtccagttcaacaagaacctggccgggagatacgccaacacctacaaaaactggttcccggggcccatgggccgaacccagggctggaacctgggctccggggtcaaccgcgccagtgtcagcgccttcgccacgaccaataggatggagctcgagggcgcgagttaccaggtgcccccgcagccgaacggcatgaccaacaacctccagggcagcaacacctatgccctggagaacactatgatcttcaacagccagccggcgaacccgggcaccaccgccacgtacctcgagggcaacatgctcatcaccagcgagagcgagacacagccggtgaaccgcgtggcgtacaacgtcggcgggcagatggccaccaacaaccagagctccaccactgcccccgcgaccggcacgtacaacctccaggaaatcgtgcccggcagcgtgtggatggagagggacgtgtacctccaaggacccatctgggccaagatcccagagacaggggcgcactttcacccctctccggccatgggcggattcggactcaaacacccaccgcccatgatgctcatcaagaacacgcctgtgcccggaaatatcaccagcttctcggacgtgcccgtcagcagcttcatcacccagtacagcaccgggcaggtcaccgtggagatggagtgggagctcaagaaggaaaactccaagaggtggaacccagagatccagtacacaaacaactacaacgacccccagtttgtggactttgccccggacagcaccggggaatacagaaccaccagacctatcggaacccgataccttacccgacccctttaa

SEQ ID NO: 43 - protein, 111 aa, Artificial Sequence
  synthetic sequence
MSSSIKIKPVVLCCLVITISDPETGSIEESLSTGQTRSRESTTSRTTSSLRRETTPTSSTTTRTPSFRRSSPTTHPSGETSERQSFRPRKGFSNLLAWLKRVLRRPLPESG

SEQ ID NO: 44 - DNA, 336 bp, Artificial Sequence
  synthetic sequence
atgagcagcagcatcaagatcaagcccgtggtcttgtgctgcctggttataactatctcggacccggaaacgggctcgatcgaggagagcctgtcaacagggcagacgaggtcgcgcgagagcacgacatctcgtacaacgagcagcttgaggcgggagacaacccctacctcaagtacaaccacgcggacgccgagtttcaggagaagctcgccgacgacacatccttcgggggaaacctcggaaaggcagtctttcaggccaagaaaagggttctcgaaccttttggcctggttgaagagggtgctaagacggcccctaccggaaagcggatag

SEQ ID NO: 45 - protein, 724 aa, Artificial Sequence
  synthetic sequence
MSFVDHPPDWLEEVGDGLRLFLGLEAGPPKPKPNQQHQDQARGLVLPGYNYLGPGNGLDRGEPVNRADEVAREHDISYNEQLEAGDNPYLKYNHADAEFQEKLADDTSFGGNLGKAVFQAKKRVLEPFGLVEEGAKTAPTGKRIDDHFPKRKKARTEEDSKPSTSSDAEAGPSGSQQLQIPAQPASSLGADTMSAGGGGPLGDNNQGADGVGNASGDWHCDSTWMGDRVVTKSTRTWVLPSYNNHQYREIKSGSVDGSNANAYFGYSTPWGYFDFNRFHSHWSPRDWQRLINNYWGFRPRSLRVKIFNIQVKEVTVQDSTTTIANNLTSTVQVFTDDDYQLPYVVGNGTEGCLPAFPPQVFTLPQYGYATLNRDNTENPTERSSFFCLEYFPSKMLRTGNNFEFTYNFEEVPFHSSFAPSQNLFKLANPLVDQYLYRFVSTNNTGGVQFNKNLAGRYANTYKNWFPGPMGRTQGWNLGSGVNRASVSAFATTNRMELEGASYQVPPQPNGMTNNLQGSNTYALENTMIFNSQPANPGTTATYLEGNMLITSESETQPVNRVAYNVGGQMATNNQSSTTAPATGTYNLQEIVPGSVWMERDVYLQGPIWAKIPETGAHFHPSPAMGGFGLKHPPPMMLIKNTPVPGNITSFSDVPVSSFITQYSTGQVTVEMEWELKKENSKRWNPEIQYTNNYNDPQFVDFAPDSTGEYRTTRPIGTRYLTRPL

SEQ ID NO: 46 - DNA, 2175 bp, Artificial Sequence
  synthetic sequence
atgtcttttgttgatcaccctccagattggttggaagaagttggtgatggtctacgcctgtttttgggccttgaagcgggcccaccgaaaccaaaacccaatcagcagcatcaagatcaagcccgtggtcttgtgctgcctggttataactatctcggacccggaaacgggctcgatcgaggagagcctgtcaacagggcagacgaggtcgcgcgagagcacgacatctcgtacaacgagcagcttgaggcgggagacaacccctacctcaagtacaaccacgcggacgccgagtttcaggagaagctcgccgacgacacatccttcgggggaaacctcggaaaggcagtctttcaggccaagaaaagggttctcgaaccttttggcctggttgaagagggtgctaagacggcccctaccggaaagcggatagacgaccactttccaaaaagaaagaaggctcggaccgaagaggactccaagccttccacctcgtcagacgccgaagctggacccagcggatcccagcagctgcaaatcccagcccaaccagcctcaagtttgggagctgatacaatgtctgcgggaggtggcggcccattgggcgacaataaccaaggtgccgatggagtgggcaatgcctcgggagattggcattgcgattccacgtggatgggggacagagtcgtcaccaagtccacccgaacctgggtgctgcccagctacaacaaccaccagtaccgagagatcaaaagcggctccgtcgacggaagcaacgccaacgcctactttggatacagcaccccctgggggtactttgactttaaccgcttccacagccactggagcccccgagactggcaaagactcatcaacaactactggggcttcagaccccggtccctcagagtcaaaatcttcaacattcaagtcaaagaggtcacggtgcaggactccaccaccaccatcgccaacaacctcacctccaccgtccaagtgtttacggacgacgactaccagctgccctacgtcgtcggcaacgggaccgagggatgcctgccggccttccctccgcaggtctttacgctgccgcagtacggttacgcgacgctgaaccgcgacaacacagaaaatcccaccgagaggagcagcttcttctgcctagagtactttcccagcaagatgctgagaacgggcaacaactttgagtttacctacaactttgaggaggtgcccttccactccagcttcgctcccagtcagaacctgttcaagctggccaacccgctggtggaccagtacttgtaccgcttcgtgagcacaaataacactggcggagtccagttcaacaagaacctggccgggagatacgccaacacctacaaaaactggttcccggggcccatgggccgaacccagggctggaacctgggctccggggtcaaccgcgccagtgtcagcgccttcgccacgaccaataggatggagctcgagggcgcgagttaccaggtgcccccgcagccgaacggcatgaccaacaacctccagggcagcaacacctatgccctggagaacactatgatcttcaacagccagccggcgaacccgggcaccaccgccacgtacctcgagggcaacatgctcatcaccagcgagagcgagacacagccggtgaaccgcgtggcgtacaacgtcggcgggcagatggccaccaacaaccagagctccaccactgcccccgcgaccggcacgtacaacctccaggaaatcgtgcccggcagcgtgtggatggagagggacgtgtacctccaaggacccatctgggccaagatcccagagacaggggcgcactttcacccctctccggccatgggcggattcggactcaaacacccaccgcccatgatgctcatcaagaacacgcctgtgcccggaaatatcaccagcttctcggacgtgcccgtcagcagcttcatcacccagtacagcaccgggcaggtcaccgtggagatggagtgggagctcaagaaggaaaactccaagaggtggaacccagagatccagtacacaaacaactacaacgacccccagtttgtggactttgccccggacagcaccggggaatacagaaccaccagacctatcggaacccgataccttacccgacccctttaa

SEQ ID NO: 47 - protein, 128 aa, Artificial Sequence
  synthetic sequence
MVYACFWALKRAHRNQNPISSIKIKPVVLCCLVITISDPETGSIEESLSTGQTRSRESTTSRTTSSLRRETTPTSSTTTRTPSFRRSSPTTHPSGETSERQSFRPRKGFSNLLAWLKRVLRRPLPESG

SEQ ID NO: 48 - DNA, 387 bp, Artificial Sequence
  synthetic sequence
atggtctacgcctgtttttgggccttgaagcgggcccaccgaaaccaaaacccaatcagcagcatcaagatcaagcccgtggtcttgtgctgcctggttataactatctcggacccggaaacgggctcgatcgaggagagcctgtcaacagggcagacgaggtcgcgcgagagcacgacatctcgtacaacgagcagcttgaggcgggagacaacccctacctcaagtacaaccacgcggacgccgagtttcaggagaagctcgccgacgacacatccttcgggggaaacctcggaaaggcagtctttcaggccaagaaaagggttctcgaaccttttggcctggttgaagagggtgctaagacggcccctaccggaaagcggatag

SEQ ID NO: 49 - protein, 724 aa, Artificial Sequence
  synthetic sequence
MSFVDHPPDWLNEVGEGLREFLGLEAGPPKPKPNQQHQDQARGLVLPGYNYLGPGNGLDRGEPVNRADEVAREHDISYNEQLEAGDNPYLKYNHADAEFQEKLADDTSFGGNLGKAVFQAKKRVLEPFGLVEEGAKTAPTGKRIDDHFPKRKKARTEEDSKPSTSSDAEAGPSGSQQLQIPAQPASSLGADTMSAGGGGPLGDNNQGADGVGNASGDWHCDSTWMGDRVVTKSTRTWVLPSYNNHQYREIKSGSVDGSNANAYFGYSTPWGYFDFNRFHSHWSPRDWQRLINNYWGFRPRSLRVKIFNIQVKEVTVQDSTTTIANNLTSTVQVFTDDDYQLPYVVGNGTEGCLPAFPPQVFTLPQYGYATLNRDNTENPTERSSFFCLEYFPSKMLRTGNNFEFTYNFEEVPFHSSFAPSQNLFKLANPLVDQYLYRFVSTNNTGGVQFNKNLAGRYANTYKNWFPGPMGRTQGWNLGSGVNRASVSAFATTNRMELEGASYQVPPQPNGMTNNLQGSNTYALENTMIFNSQPANPGTTATYLEGNMLITSESETQPVNRVAYNVGGQMATNNQSSTTAPATGTYNLQEIVPGSVWMERDVYLQGPIWAKIPETGAHFHPSPAMGGFGLKHPPPMMLIKNTPVPGNITSFSDVPVSSFITQYSTGQVTVEMEWELKKENSKRWNPEIQYTNNYNDPQFVDFAPDSTGEYRTTRPIGTRYLTRPL

SEQ ID NO: 50 - DNA, 2175 bp, Artificial Sequence
  synthetic sequence
atgtcttttgttgatcaccctccagattggttgaatgaagttggtgaaggtctacgcgagtttttgggccttgaagcgggcccaccgaaaccaaaacccaatcagcagcatcaagatcaagcccgtggtcttgtgctgcctggttataactatctcggacccggaaacgggctcgatcgaggagagcctgtcaacagggcagacgaggtcgcgcgagagcacgacatctcgtacaacgagcagcttgaggcgggagacaacccctacctcaagtacaaccacgcggacgccgagtttcaggagaagctcgccgacgacacatccttcgggggaaacctcggaaaggcagtctttcaggccaagaaaagggttctcgaaccttttggcctggttgaagagggtgctaagacggcccctaccggaaagcggatagacgaccactttccaaaaagaaagaaggctcggaccgaagaggactccaagccttccacctcgtcagacgccgaagctggacccagcggatcccagcagctgcaaatcccagcccaaccagcctcaagtttgggagctgatacaatgtctgcgggaggtggcggcccattgggcgacaataaccaaggtgccgatggagtgggcaatgcctcgggagattggcattgcgattccacgtggatgggggacagagtcgtcaccaagtccacccgaacctgggtgctgcccagctacaacaaccaccagtaccgagagatcaaaagcggctccgtcgacggaagcaacgccaacgcctactttggatacagcaccccctgggggtactttgactttaaccgcttccacagccactggagcccccgagactggcaaagactcatcaacaactactggggcttcagaccccggtccctcagagtcaaaatcttcaacattcaagtcaaagaggtcacggtgcaggactccaccaccaccatcgccaacaacctcacctccaccgtccaagtgtttacggacgacgactaccagctgccctacgtcgtcggcaacgggaccgagggatgcctgccggccttccctccgcaggtctttacgctgccgcagtacggttacgcgacgctgaaccgcgacaacacagaaaatcccaccgagaggagcagcttcttctgcctagagtactttcccagcaagatgctgagaacgggcaacaactttgagtttacctacaactttgaggaggtgcccttccactccagcttcgctcccagtcagaacctgttcaagctggccaacccgctggtggaccagtacttgtaccgcttcgtgagcacaaataacactggcggagtccagttcaacaagaacctggccgggagatacgccaacacctacaaaaactggttcccggggcccatgggccgaacccagggctggaacctgggctccggggtcaaccgcgccagtgtcagcgccttcgccacgaccaataggatggagctcgagggcgcgagttaccaggtgcccccgcagccgaacggcatgaccaacaacctccagggcagcaacacctatgccctggagaacactatgatcttcaacagccagccggcgaacccgggcaccaccgccacgtacctcgagggcaacatgctcatcaccagcgagagcgagacacagccggtgaaccgcgtggcgtacaacgtcggcgggcagatggccaccaacaaccagagctccaccactgcccccgcgaccggcacgtacaacctccaggaaatcgtgcccggcagcgtgtggatggagagggacgtgtacctccaaggacccatctgggccaagatcccagagacaggggcgcactttcacccctctccggccatgggcggattcggactcaaacacccaccgcccatgatgctcatcaagaacacgcctgtgcccggaaatatcaccagcttctcggacgtgcccgtcagcagcttcatcacccagtacagcaccgggcaggtcaccgtggagatggagtgggagctcaagaaggaaaactccaagaggtggaacccagagatccagtacacaaacaactacaacgacccccagtttgtggactttgccccggacagcaccggggaatacagaaccaccagacctatcggaacccgataccttacccgacccctttaa

SEQ ID NO: 51 - protein, 132 aa, Artificial Sequence
  synthetic sequence
MKLVKVYASFWALKRAHRNQNPISSIKIKPVVLCCLVITISDPETGSIEESLSTGQTRSRESTTSRTTSSLRRETTPTSSTTTRTPSFRRSSPTTHPSGETSERQSFRPRKGFSNLLAWLKRVLRRPLPESG

SEQ ID NO: 52 - DNA, 399 bp, Artificial Sequence
  synthetic sequence
atgaagttggtgaaggtctacgcgagtttttgggccttgaagcgggcccaccgaaaccaaaacccaatcagcagcatcaagatcaagcccgtggtcttgtgctgcctggttataactatctcggacccggaaacgggctcgatcgaggagagcctgtcaacagggcagacgaggtcgcgcgagagcacgacatctcgtacaacgagcagcttgaggcgggagacaacccctacctcaagtacaaccacgcggacgccgagtttcaggagaagctcgccgacgacacatccttcgggggaaacctcggaaaggcagtctttcaggccaagaaaagggttctcgaaccttttggcctggttgaagagggtgctaagacggcccctaccggaaagcggatag

SEQ ID NO: 53 - protein, 724 aa, Artificial Sequence
  synthetic sequence
MSFVDHPPDWLEEVGEGLREFLGLEAGPPKPKPNQQHQDHARGLVLPGYNYLGPGNGLDRGEPVNRADEVAREHDISYNEQLEAGDNPYLKYNHADAEFQEKLADDTSFGGNLGKAVFQAKKRVLEPFGLVEEGAKTAPTGKRIDDHFPKRKKARTEEDSKPSTSSDAEAGPSGSQQLQIPAQPASSLGADTMSAGGGGPLGDNNQGADGVGNASGDWHCDSTWMGDRVVTKSTRTWVLPSYNNHQYREIKSGSVDGSNANAYFGYSTPWGYFDFNRFHSHWSPRDWQRLINNYWGFRPRSLRVKIFNIQVKEVTVQDSTTTIANNLTSTVQVFTDDDYQLPYVVGNGTEGCLPAFPPQVFTLPQYGYATLNRDNTENPTERSSFFCLEYFPSKMLRTGNNFEFTYNFEEVPFHSSFAPSQNLFKLANPLVDQYLYRFVSTNNTGGVQFNKNLAGRYANTYKNWFPGPMGRTQGWNLGSGVNRASVSAFATTNRMELEGASYQVPPQPNGMTNNLQGSNTYALENTMIFNSQPANPGTTATYLEGNMLITSESETQPVNRVAYNVGGQMATNNQSSTTAPATGTYNLQEIVPGSVWMERDVYLQGPIWAKIPETGAHFHPSPAMGGFGLKHPPPMMLIKNTPVPGNITSFSDVPVSSFITQYSTGQVTVEMEWELKKENSKRWNPEIQYTNNYNDPQFVDFAPDSTGEYRTTRPIGTRYLTRPL

SEQ ID NO: 54 - DNA, 2175 bp, Artificial Sequence
  synthetic sequence
atgtcttttgttgatcaccctccagattggttggaagaagttggtgaaggtcttcgcgagtttttgggccttgaagcgggcccaccgaaaccaaaacccaatcagcagcatcaagatcatgcccgtggtcttgtgctgcctggttataactatctcggacccggaaacgggctcgatcgaggagagcctgtcaacagggcagacgaggtcgcgcgagagcacgacatctcgtacaacgagcagcttgaggcgggagacaacccctacctcaagtacaaccacgcggacgccgagtttcaggagaagctcgccgacgacacatccttcgggggaaacctcggaaaggcagtctttcaggccaagaaaagggttctcgaaccttttggcctggttgaagagggtgctaagacggcccctaccggaaagcggatagacgaccactttccaaaaagaaagaaggctcggaccgaagaggactccaagccttccacctcgtcagacgccgaagctggacccagcggatcccagcagctgcaaatcccagcccaaccagcctcaagtttgggagctgatacaatgtctgcgggaggtggcggcccattgggcgacaataaccaaggtgccgatggagtgggcaatgcctcgggagattggcattgcgattccacgtggatgggggacagagtcgtcaccaagtccacccgaacctgggtgctgcccagctacaacaaccaccagtaccgagagatcaaaagcggctccgtcgacggaagcaacgccaacgcctactttggatacagcaccccctgggggtactttgactttaaccgcttccacagccactggagcccccgagactggcaaagactcatcaacaactactggggcttcagaccccggtccctcagagtcaaaatcttcaacattcaagtcaaagaggtcacggtgcaggactccaccaccaccatcgccaacaacctcacctccaccgtccaagtgtttacggacgacgactaccagctgccctacgtcgtcggcaacgggaccgagggatgcctgccggccttccctccgcaggtctttacgctgccgcagtacggttacgcgacgctgaaccgcgacaacacagaaaatcccaccgagaggagcagcttcttctgcctagagtactttcccagcaagatgctgagaacgggcaacaactttgagtttacctacaactttgaggaggtgcccttccactccagcttcgctcccagtcagaacctgttcaagctggccaacccgctggtggaccagtacttgtaccgcttcgtgagcacaaataacactggcggagtccagttcaacaagaacctggccgggagatacgccaacacctacaaaaactggttcccggggcccatgggccgaacccagggctggaacctgggctccggggtcaaccgcgccagtgtcagcgccttcgccacgaccaataggatggagctcgagggcgcgagttaccaggtgcccccgcagccgaacggcatgaccaacaacctccagggcagcaacacctatgccctggagaacactatgatcttcaacagccagccggcgaacccgggcaccaccgccacgtacctcgagggcaacatgctcatcaccagcgagagcgagacacagccggtgaaccgcgtggcgtacaacgtcggcgggcagatggccaccaacaaccagagctccaccactgcccccgcgaccggcacgtacaacctccaggaaatcgtgcccggcagcgtgtggatggagagggacgtgtacctccaaggacccatctgggccaagatcccagagacaggggcgcactttcacccctctccggccatgggcggattcggactcaaacacccaccgcccatgatgctcatcaagaacacgcctgtgcccggaaatatcaccagcttctcggacgtgcccgtcagcagcttcatcacccagtacagcaccgggcaggtcaccgtggagatggagtgggagctcaagaaggaaaactccaagaggtggaacccagagatccagtacacaaacaactacaacgacccccagtttgtggactttgccccggacagcaccggggaatacagaaccaccagacctatcggaacccgataccttacccgacccctttaa

SEQ ID NO: 55 - protein, 104 aa, Artificial Sequence
  synthetic sequence
MPVVLCCLVITISDPETGSIEESLSTGQTRSRESTTSRTTSSLRRETTPTSSTTTRTPSFRRSSPTTHPSGETSERQSFRPRKGFSNLLAWLKRVLRRPLPESG

SEQ ID NO: 56 - DNA, 315 bp, Artificial Sequence
  synthetic sequence
atgcccgtggtcttgtgctgcctggttataactatctcggacccggaaacgggctcgatcgaggagagcctgtcaacagggcagacgaggtcgcgcgagagcacgacatctcgtacaacgagcagcttgaggcgggagacaacccctacctcaagtacaaccacgcggacgccgagtttcaggagaagctcgccgacgacacatccttcgggggaaacctcggaaaggcagtctttcaggccaagaaaagggttctcgaaccttttggcctggttgaagagggtgctaagacggcccctaccggaaagcggatag

SEQ ID NO: 57 - protein, 724 aa, Artificial Sequence
  synthetic sequence
MSFVDHPPDWLEEVGEGLREFLGLEAGPPKPKPNQQHQDQARGLVLPGYAYLGPFNGLDRGEPVNRADEVAREHDISYNEQLEAGDNPYLKYNHADAEFQEKLADDTSFGGNLGKAVFQAKKRVLEPFGLVEEGAKTAPTGKRIDDHFPKRKKARTEEDSKPSTSSDAEAGPSGSQQLQIPAQPASSLGADTMSAGGGGPLGDNNQGADGVGNASGDWHCDSTWMGDRVVTKSTRTWVLPSYNNHQYREIKSGSVDGSNANAYFGYSTPWGYFDFNRFHSHWSPRDWQRLINNYWGFRPRSLRVKIFNIQVKEVTVQDSTTTIANNLTSTVQVFTDDDYQLPYVVGNGTEGCLPAFPPQVFTLPQYGYATLNRDNTENPTERSSFFCLEYFPSKMLRTGNNFEFTYNFEEVPFHSSFAPSQNLFKLANPLVDQYLYRFVSTNNTGGVQFNKNLAGRYANTYKNWFPGPMGRTQGWNLGSGVNRASVSAFATTNRMELEGASYQVPPQPNGMTNNLQGSNTYALENTMIFNSQPANPGTTATYLEGNMLITSESETQPVNRVAYNVGGQMATNNQSSTTAPATGTYNLQEIVPGSVWMERDVYLQGPIWAKIPETGAHFHPSPAMGGFGLKHPPPMMLIKNTPVPGNITSFSDVPVSSFITQYSTGQVTVEMEWELKKENSKRWNPEIQYTNNYNDPQFVDFAPDSTGEYRTTRPIGTRYLTRPL

SEQ ID NO: 58 - DNA, 2175 bp, Artificial Sequence
  synthetic sequence
atgtcttttgttgatcaccctccagattggttggaagaagttggtgaaggtcttcgcgagtttttgggccttgaagcgggcccaccgaaaccaaaacccaatcagcagcatcaagatcaagcccgtggtcttgtgctgcctggttatgcctatctcggacccttcaacgggctcgatcgaggagagcctgtcaacagggcagacgaggtcgcgcgagagcacgacatctcgtacaacgagcagcttgaggcgggagacaacccctacctcaagtacaaccacgcggacgccgagtttcaggagaagctcgccgacgacacatccttcgggggaaacctcggaaaggcagtctttcaggccaagaaaagggttctcgaaccttttggcctggttgaagagggtgctaagacggcccctaccggaaagcggatagacgaccactttccaaaaagaaagaaggctcggaccgaagaggactccaagccttccacctcgtcagacgccgaagctggacccagcggatcccagcagctgcaaatcccagcccaaccagcctcaagtttgggagctgatacaatgtctgcgggaggtggcggcccattgggcgacaataaccaaggtgccgatggagtgggcaatgcctcgggagattggcattgcgattccacgtggatgggggacagagtcgtcaccaagtccacccgaacctgggtgctgcccagctacaacaaccaccagtaccgagagatcaaaagcggctccgtcgacggaagcaacgccaacgcctactttggatacagcaccccctgggggtactttgactttaaccgcttccacagccactggagcccccgagactggcaaagactcatcaacaactactggggcttcagaccccggtccctcagagtcaaaatcttcaacattcaagtcaaagaggtcacggtgcaggactccaccaccaccatcgccaacaacctcacctccaccgtccaagtgtttacggacgacgactaccagctgccctacgtcgtcggcaacgggaccgagggatgcctgccggccttccctccgcaggtctttacgctgccgcagtacggttacgcgacgctgaaccgcgacaacacagaaaatcccaccgagaggagcagcttcttctgcctagagtactttcccagcaagatgctgagaacgggcaacaactttgagtttacctacaactttgaggaggtgcccttccactccagcttcgctcccagtcagaacctgttcaagctggccaacccgctggtggaccagtacttgtaccgcttcgtgagcacaaataacactggcggagtccagttcaacaagaacctggccgggagatacgccaacacctacaaaaactggttcccggggcccatgggccgaacccagggctggaacctgggctccggggtcaaccgcgccagtgtcagcgccttcgccacgaccaataggatggagctcgagggcgcgagttaccaggtgcccccgcagccgaacggcatgaccaacaacctccagggcagcaacacctatgccctggagaacactatgatcttcaacagccagccggcgaacccgggcaccaccgccacgtacctcgagggcaacatgctcatcaccagcgagagcgagacacagccggtgaaccgcgtggcgtacaacgtcggcgggcagatggccaccaacaaccagagctccaccactgcccccgcgaccggcacgtacaacctccaggaaatcgtgcccggcagcgtgtggatggagagggacgtgtacctccaaggacccatctgggccaagatcccagagacaggggcgcactttcacccctctccggccatgggcggattcggactcaaacacccaccgcccatgatgctcatcaagaacacgcctgtgcccggaaatatcaccagcttctcggacgtgcccgtcagcagcttcatcacccagtacagcaccgggcaggtcaccgtggagatggagtgggagctcaagaaggaaaactccaagaggtggaacccagagatccagtacacaaacaactacaacgacccccagtttgtggactttgccccggacagcaccggggaatacagaaccaccagacctatcggaacccgataccttacccgacccctttaa

SEQ ID NO: 59 - protein, 95 aa, Artificial Sequence
  synthetic sequence
MPISDPSTGSIEESLSTGQTRSRESTTSRTTSSLRRETTPTSSTTTRTPSFRRSSPTTHPSGETSERQSFRPRKGFSNLLAWLKRVLRRPLPESG

SEQ ID NO: 60 - DNA, 288 bp, Artificial Sequence
  synthetic sequence
atgcctatctcggacccttcaacgggctcgatcgaggagagcctgtcaacagggcagacgaggtcgcgcgagagcacgacatctcgtacaacgagcagcttgaggcgggagacaacccctacctcaagtacaaccacgcggacgccgagtttcaggagaagctcgccgacgacacatccttcgggggaaacctcggaaaggcagtctttcaggccaagaaaagggttctcgaaccttttggcctggttgaagagggtgctaagacggcccctaccggaaagcggatag

SEQ ID NO: 61 - protein, 724 aa, Artificial Sequence
  synthetic sequence
MSFVDHPPDWLEEVGEGLREFLGLEAGPPKPKPNQQHQDQARGLVLPGYNYLGPGNGLDRGEPVNRADEVAREHDISYNEQLHAGDNPYLKYNHADAEFQEKLADDTSFGGNLGKAVFQAKKRVLEPFGLVEEGAKTAPTGKRIDDHFPKRKKARTEEDSKPSTSSDAEAGPSGSQQLQIPAQPASSLGADTMSAGGGGPLGDNNQGADGVGNASGDWHCDSTWMGDRVVTKSTRTWVLPSYNNHQYREIKSGSVDGSNANAYFGYSTPWGYFDFNRFHSHWSPRDWQRLINNYWGFRPRSLRVKIFNIQVKEVTVQDSTTTIANNLTSTVQVFTDDDYQLPYVVGNGTEGCLPAFPPQVFTLPQYGYATLNRDNTENPTERSSFFCLEYFPSKMLRTGNNFEFTYNFEEVPFHSSFAPSQNLFKLANPLVDQYLYRFVSTNNTGGVQFNKNLAGRYANTYKNWFPGPMGRTQGWNLGSGVNRASVSAFATTNRMELEGASYQVPPQPNGMTNNLQGSNTYALENTMIFNSQPANPGTTATYLEGNMLITSESETQPVNRVAYNVGGQMATNNQSSTTAPATGTYNLQEIVPGSVWMERDVYLQGPIWAKIPETGAHFHPSPAMGGFGLKHPPPMMLIKNTPVPGNITSFSDVPVSSFITQYSTGQVTVEMEWELKKENSKRWNPEIQYTNNYNDPQFVDFAPDSTGEYRTTRPIGTRYLTRPL

SEQ ID NO: 62 - DNA, 2175 bp, Artificial Sequence
  synthetic sequence
atgtcttttgttgatcaccctccagattggttggaagaagttggtgaaggtcttcgcgagtttttgggccttgaagcgggcccaccgaaaccaaaacccaatcagcagcatcaagatcaagcccgtggtcttgtgctgcctggttataactatctcggacccggaaacgggctcgatcgaggagagcctgtcaacagggcagacgaggtcgcgcgagagcacgacatctcgtacaacgagcagcttcatgcgggagacaacccctacctcaagtacaaccacgcggacgccgagtttcaggagaagctcgccgacgacacatccttcgggggaaacctcggaaaggcagtctttcaggccaagaaaagggttctcgaaccttttggcctggttgaagagggtgctaagacggcccctaccggaaagcggatagacgaccactttccaaaaagaaagaaggctcggaccgaagaggactccaagccttccacctcgtcagacgccgaagctggacccagcggatcccagcagctgcaaatcccagcccaaccagcctcaagtttgggagctgatacaatgtctgcgggaggtggcggcccattgggcgacaataaccaaggtgccgatggagtgggcaatgcctcgggagattggcattgcgattccacgtggatgggggacagagtcgtcaccaagtccacccgaacctgggtgctgcccagctacaacaaccaccagtaccgagagatcaaaagcggctccgtcgacggaagcaacgccaacgcctactttggatacagcaccccctgggggtactttgactttaaccgcttccacagccactggagcccccgagactggcaaagactcatcaacaactactggggcttcagaccccggtccctcagagtcaaaatcttcaacattcaagtcaaagaggtcacggtgcaggactccaccaccaccatcgccaacaacctcacctccaccgtccaagtgtttacggacgacgactaccagctgccctacgtcgtcggcaacgggaccgagggatgcctgccggccttccctccgcaggtctttacgctgccgcagtacggttacgcgacgctgaaccgcgacaacacagaaaatcccaccgagaggagcagcttcttctgcctagagtactttcccagcaagatgctgagaacgggcaacaactttgagtttacctacaactttgaggaggtgcccttccactccagcttcgctcccagtcagaacctgttcaagctggccaacccgctggtggaccagtacttgtaccgcttcgtgagcacaaataacactggcggagtccagttcaacaagaacctggccgggagatacgccaacacctacaaaaactggttcccggggcccatgggccgaacccagggctggaacctgggctccggggtcaaccgcgccagtgtcagcgccttcgccacgaccaataggatggagctcgagggcgcgagttaccaggtgcccccgcagccgaacggcatgaccaacaacctccagggcagcaacacctatgccctggagaacactatgatcttcaacagccagccggcgaacccgggcaccaccgccacgtacctcgagggcaacatgctcatcaccagcgagagcgagacacagccggtgaaccgcgtggcgtacaacgtcggcgggcagatggccaccaacaaccagagctccaccactgcccccgcgaccggcacgtacaacctccaggaaatcgtgcccggcagcgtgtggatggagagggacgtgtacctccaaggacccatctgggccaagatcccagagacaggggcgcactttcacccctctccggccatgggcggattcggactcaaacacccaccgcccatgatgctcatcaagaacacgcctgtgcccggaaatatcaccagcttctcggacgtgcccgtcagcagcttcatcacccagtacagcaccgggcaggtcaccgtggagatggagtgggagctcaagaaggaaaactccaagaggtggaacccagagatccagtacacaaacaactacaacgacccccagtttgtggactttgccccggacagcaccggggaatacagaaccaccagacctatcggaacccgataccttacccgacccctttaa

SEQ ID NO: 63 - protein, 61 aa, Artificial Sequence; identical to SEQ ID NO: 35
  synthetic sequence

SEQ ID NO: 64 - DNA, 186 bp, Artificial Sequence; identical to SEQ ID NO: 36
  synthetic sequence

SEQ ID NO: 65 - protein, 724 aa, Artificial Sequence
  synthetic sequence
MSFVDHPPDWLEEVGEGLREFLGLEAGPPKPKPNQQHQDQARGLVLPGYAYLGPGNGLDRGEPVNRADEVAREHDISYNEQLEAGDNPYLKYNHADAEFQEKLADDTSFGGNLGKAVFQAKKRVLEPFGLVEEGAKTAPTGKRIDDHFPKRKKARTEEDSKPSTSSDAEAGPSGSQQLQIPAQPASSLGADTMSAGGGGPLGDNNQGADGVGNASGDWHCDSTWMGDRVVTKSTRTWVLPSYNNHQYREIKSGSVDGSNANAYFGYSTPWGYFDFNRFHSHWSPRDWQRLINNYWGFRPRSLRVKIFNIQVKEVTVQDSTTTIANNLTSTVQVFTDDDYQLPYVVGNGTEGCLPAFPPQVFTLPQYGYATLNRDNTENPTERSSFFCLEYFPSKMLRTGNNFEFTYNFEEVPFHSSFAPSQNLFKLANPLVDQYLYRFVSTNNTGGVQFNKNLAGRYANTYKNWFPGPMGRTQGWNLGSGVNRASVSAFATTNRMELEGASYQVPPQPNGMTNNLQGSNTYALENTMIFNSQPANPGTTATYLEGNMLITSESETQPVNRVAYNVGGQMATNNQSSTTAPATGTYNLQEIVPGSVWMERDVYLQGPIWAKIPETGAHFHPSPAMGGFGLKHPPPMMLIKNTPVPGNITSFSDVPVSSFITQYSTGQVTVEMEWELKKENSKRWNPEIQYTNNYNDPQFVDFAPDSTGEYRTTRPIGTRYLTRPL

SEQ ID NO: 66 - DNA, 2175 bp, Artificial Sequence
  synthetic sequence
atgtcttttgttgatcaccctccagattggttggaagaagttggtgaaggtcttcgcgagtttttgggccttgaagcgggcccaccgaaaccaaaacccaatcagcagcatcaagatcaagcccgtggtcttgtgctgcctggttatgcttatctcggacccggaaacgggctcgatcgaggagagcctgtcaacagggcagacgaggtcgcgcgagagcacgacatctcgtacaacgagcagcttgaggcgggagacaacccctacctcaagtacaaccacgcggacgccgagtttcaggagaagctcgccgacgacacatccttcgggggaaacctcggaaaggcagtctttcaggccaagaaaagggttctcgaaccttttggcctggttgaagagggtgctaagacggcccctaccggaaagcggatagacgaccactttccaaaaagaaagaaggctcggaccgaagaggactccaagccttccacctcgtcagacgccgaagctggacccagcggatcccagcagctgcaaatcccagcccaaccagcctcaagtttgggagctgatacaatgtctgcgggaggtggcggcccattgggcgacaataaccaaggtgccgatggagtgggcaatgcctcgggagattggcattgcgattccacgtggatgggggacagagtcgtcaccaagtccacccgaacctgggtgctgcccagctacaacaaccaccagtaccgagagatcaaaagcggctccgtcgacggaagcaacgccaacgcctactttggatacagcaccccctgggggtactttgactttaaccgcttccacagccactggagcccccgagactggcaaagactcatcaacaactactggggcttcagaccccggtccctcagagtcaaaatcttcaacattcaagtcaaagaggtcacggtgcaggactccaccaccaccatcgccaacaacctcacctccaccgtccaagtgtttacggacgacgactaccagctgccctacgtcgtcggcaacgggaccgagggatgcctgccggccttccctccgcaggtctttacgctgccgcagtacggttacgcgacgctgaaccgcgacaacacagaaaatcccaccgagaggagcagcttcttctgcctagagtactttcccagcaagatgctgagaacgggcaacaactttgagtttacctacaactttgaggaggtgcccttccactccagcttcgctcccagtcagaacctgttcaagctggccaacccgctggtggaccagtacttgtaccgcttcgtgagcacaaataacactggcggagtccagttcaacaagaacctggccgggagatacgccaacacctacaaaaactggttcccggggcccatgggccgaacccagggctggaacctgggctccggggtcaaccgcgccagtgtcagcgccttcgccacgaccaataggatggagctcgagggcgcgagttaccaggtgcccccgcagccgaacggcatgaccaacaacctccagggcagcaacacctatgccctggagaacactatgatcttcaacagccagccggcgaacccgggcaccaccgccacgtacctcgagggcaacatgctcatcaccagcgagagcgagacacagccggtgaaccgcgtggcgtacaacgtcggcgggcagatggccaccaacaaccagagctccaccactgcccccgcgaccggcacgtacaacctccaggaaatcgtgcccggcagcgtgtggatggagagggacgtgtacctccaaggacccatctgggccaagatcccagagacaggggcgcactttcacccctctccggccatgggcggattcggactcaaacacccaccgcccatgatgctcatcaagaacacgcctgtgcccggaaatatcaccagcttctcggacgtgcccgtcagcagcttcatcacccagtacagcaccgggcaggtcaccgtggagatggagtgggagctcaagaaggaaaactccaagaggtggaacccagagatccagtacacaaacaactacaacgacccccagtttgtggactttgccccggacagcaccggggaatacagaaccaccagacctatcggaacccgataccttacccgacccctttaa

SEQ ID NO: 67 - protein, 95 aa, Artificial Sequence
  synthetic sequence
MLISDPETGSIEESLSTGQTRSRESTTSRTTSSLRRETTPTSSTTTRTPSFRRSSPTTHPSGETSERQSFRPRKGFSNLLAWLKRVLRRPLPESG

SEQ ID NO: 68 - DNA, 288 bp, Artificial Sequence
  synthetic sequence
atgcttatctcggacccggaaacgggctcgatcgaggagagcctgtcaacagggcagacgaggtcgcgcgagagcacgacatctcgtacaacgagcagcttgaggcgggagacaacccctacctcaagtacaaccacgcggacgccgagtttcaggagaagctcgccgacgacacatccttcgggggaaacctcggaaaggcagtctttcaggccaagaaaagggttctcgaaccttttggcctggttgaagagggtgctaagacggcccctaccggaaagcggatag

SEQ ID NO: 69 - protein, 724 aa, Artificial Sequence
  synthetic sequence
MSFVDHPPDWLEEVGEGLREFLGLEAGPPKPKPNQQHQDHARGLVLPGYNYLGPGNGLERGEPVNRADEVAREHDISYNEQLEAGDNPYLKYNHADAEFQEKLADDTSFGGNLGKAVFQAKKRVLEPFGLVEEGAKTAPTGKRIDDHFPKRKKARTEEDSKPSTSSDAEAGPSGSQQLQIPAQPASSLGADTMSAGGGGPLGDNNQGADGVGNASGDWHCDSTWMGDRVVTKSTRTWVLPSYNNHQYREIKSGSVDGSNANAYFGYSTPWGYFDFNRFHSHWSPRDWQRLINNYWGFRPRSLRVKIFNIQVKEVTVQDSTTTIANNLTSTVQVFTDDDYQLPYVVGNGTEGCLPAFPPQVFTLPQYGYATLNRDNTENPTERSSFFCLEYFPSKMLRTGNNFEFTYNFEEVPFHSSFAPSQNLFKLANPLVDQYLYRFVSTNNTGGVQFNKNLAGRYANTYKNWFPGPMGRTQGWNLGSGVNRASVSAFATTNRMELEGASYQVPPQPNGMTNNLQGSNTYALENTMIFNSQPANPGTTATYLEGNMLITSESETQPVNRVAYNVGGQMATNNQSSTTAPATGTYNLQEIVPGSVWMERDVYLQGPIWAKIPETGAHFHPSPAMGGFGLKHPPPMMLIKNTPVPGNITSFSDVPVSSFITQYSTGQVTVEMEWELKKENSKRWNPEIQYTNNYNDPQFVDFAPDSTGEYRTTRPIGTRYLTRPL

SEQ ID NO: 70 - DNA, 2175 bp, Artificial Sequence
  synthetic sequence
atgtcttttgttgatcaccctccagattggttggaagaagttggtgaaggtcttcgcgagtttttgggccttgaagcgggcccaccgaaaccaaaacccaatcagcagcatcaagatcatgcccgtggtcttgtgctgcctggttataactatctcggacccggaaacgggctcgagcgaggagagcctgtcaacagggcagacgaggtcgcgcgagagcacgacatctcgtacaacgagcagcttgaggcgggagacaacccctacctcaagtacaaccacgcggacgccgagtttcaggagaagctcgccgacgacacatccttcgggggaaacctcggaaaggcagtctttcaggccaagaaaagggttctcgaaccttttggcctggttgaagagggtgctaagacggcccctaccggaaagcggatagacgaccactttccaaaaagaaagaaggctcggaccgaagaggactccaagccttccacctcgtcagacgccgaagctggacccagcggatcccagcagctgcaaatcccagcccaaccagcctcaagtttgggagctgatacaatgtctgcgggaggtggcggcccattgggcgacaataaccaaggtgccgatggagtgggcaatgcctcgggagattggcattgcgattccacgtggatgggggacagagtcgtcaccaagtccacccgaacctgggtgctgcccagctacaacaaccaccagtaccgagagatcaaaagcggctccgtcgacggaagcaacgccaacgcctactttggatacagcaccccctgggggtactttgactttaaccgcttccacagccactggagcccccgagactggcaaagactcatcaacaactactggggcttcagaccccggtccctcagagtcaaaatcttcaacattcaagtcaaagaggtcacggtgcaggactccaccaccaccatcgccaacaacctcacctccaccgtccaagtgtttacggacgacgactaccagctgccctacgtcgtcggcaacgggaccgagggatgcctgccggccttccctccgcaggtctttacgctgccgcagtacggttacgcgacgctgaaccgcgacaacacagaaaatcccaccgagaggagcagcttcttctgcctagagtactttcccagcaagatgctgagaacgggcaacaactttgagtttacctacaactttgaggaggtgcccttccactccagcttcgctcccagtcagaacctgttcaagctggccaacccgctggtggaccagtacttgtaccgcttcgtgagcacaaataacactggcggagtccagttcaacaagaacctggccgggagatacgccaacacctacaaaaactggttcccggggcccatgggccgaacccagggctggaacctgggctccggggtcaaccgcgccagtgtcagcgccttcgccacgaccaataggatggagctcgagggcgcgagttaccaggtgcccccgcagccgaacggcatgaccaacaacctccagggcagcaacacctatgccctggagaacactatgatcttcaacagccagccggcgaacccgggcaccaccgccacgtacctcgagggcaacatgctcatcaccagcgagagcgagacacagccggtgaaccgcgtggcgtacaacgtcggcgggcagatggccaccaacaaccagagctccaccactgcccccgcgaccggcacgtacaacctccaggaaatcgtgcccggcagcgtgtggatggagagggacgtgtacctccaaggacccatctgggccaagatcccagagacaggggcgcactttcacccctctccggccatgggcggattcggactcaaacacccaccgcccatgatgctcatcaagaacacgcctgtgcccggaaatatcaccagcttctcggacgtgcccgtcagcagcttcatcacccagtacagcaccgggcaggtcaccgtggagatggagtgggagctcaagaaggaaaactccaagaggtggaacccagagatccagtacacaaacaactacaacgacccccagtttgtggactttgccccggacagcaccggggaatacagaaccaccagacctatcggaacccgataccttacccgacccctttaa

SEQ ID NO: 71 - protein, 104 aa, Artificial Sequence
  synthetic sequence
MPVVLCCLVITISDPETGSSEESLSTGQTRSRESTTSRTTSSLRRETTPTSSTTTRTPSFRRSSPTTHPSGETSERQSFRPRKGFSNLLAWLKRVLRRPLPESG

SEQ ID NO: 72 - DNA, 315 bp, Artificial Sequence
  synthetic sequence
atgcccgtggtcttgtgctgcctggttataactatctcggacccggaaacgggctcgagcgaggagagcctgtcaacagggcagacgaggtcgcgcgagagcacgacatctcgtacaacgagcagcttgaggcgggagacaacccctacctcaagtacaaccacgcggacgccgagtttcaggagaagctcgccgacgacacatccttcgggggaaacctcggaaaggcagtctttcaggccaagaaaagggttctcgaaccttttggcctggttgaagagggtgctaagacggcccctaccggaaagcggatag

SEQ ID NO: 73 - protein, 724 aa, Artificial Sequence
  synthetic sequence
MAFVDHPPDWLEEVGEGLREFWDLKPGAPKPKPNQQHQDQARGLVLPGYNYLGPGNGLDRGEPVNRADEVAREHDISYNEQLEAGDNPYLKYNHADAEFQEKLADDTSFGGNLGKAVFQAKKRVLEPFGLVEEGAKTAPTGKRIDDHFPKRKKARTEEDSKPSTSSDAEAGPSGSQQLQIPAQPASSLGADTMSAGGGGPLGDNNQGADGVGNASGDWHCDSTWMGDRVVTKSTRTWVLPSYNNHQYREIKSGSVDGSNANAYFGYSTPWGYFDFNRFHSHWSPRDWQRLINNYWGFRPRSLRVKIFNIQVKEVTVQDSTTTIANNLTSTVQVFTDDDYQLPYVVGNGTEGCLPAFPPQVFTLPQYGYATLNRDNTENPTERSSFFCLEYFPSKMLRTGNNFEFTYNFEEVPFHSSFAPSQNLFKLANPLVDQYLYRFVSTNNTGGVQFNKNLAGRYANTYKNWFPGPMGRTQGWNLGSGVNRASVSAFATTNRMELEGASYQVPPQPNGMTNNLQGSNTYALENTMIFNSQPANPGTTATYLEGNMLITSESETQPVNRVAYNVGGQMATNNQSSTTAPATGTYNLQEIVPGSVWMERDVYLQGPIWAKIPETGAHFHPSPAMGGFGLKHPPPMMLIKNTPVPGNITSFSDVPVSSFITQYSTGQVTVEMEWELKKENSKRWNPEIQYTNNYNDPQFVDFAPDSTGEYRTTRPIGTRYLTRPL

SEQ ID NO: 74 - DNA, 2175 bp, Artificial Sequence
  synthetic sequence
atggcgtttgttgatcaccctccagattggttggaagaagttggtgaaggtctacgcgagttttgggaccttaaacctggcgctccgaaaccaaaacccaatcagcagcatcaagatcaagcccgtggtcttgtgctgcctggttataactatctcggacccggaaacgggctcgatcgaggagagcctgtcaacagggcagacgaggtcgcgcgagagcacgacatctcgtacaacgagcagcttgaggcgggagacaacccctacctcaagtacaaccacgcggacgccgagtttcaggagaagctcgccgacgacacatccttcgggggaaacctcggaaaggcagtctttcaggccaagaaaagggttctcgaaccttttggcctggttgaagagggtgctaagacggcccctaccggaaagcggatagacgaccactttccaaaaagaaagaaggctcggaccgaagaggactccaagccttccacctcgtcagacgccgaagctggacccagcggatcccagcagctgcaaatcccagcccaaccagcctcaagtttgggagctgatacaatgtctgcgggaggtggcggcccattgggcgacaataaccaaggtgccgatggagtgggcaatgcctcgggagattggcattgcgattccacgtggatgggggacagagtcgtcaccaagtccacccgaacctgggtgctgcccagctacaacaaccaccagtaccgagagatcaaaagcggctccgtcgacggaagcaacgccaacgcctactttggatacagcaccccctgggggtactttgactttaaccgcttccacagccactggagcccccgagactggcaaagactcatcaacaactactggggcttcagaccccggtccctcagagtcaaaatcttcaacattcaagtcaaagaggtcacggtgcaggactccaccaccaccatcgccaacaacctcacctccaccgtccaagtgtttacggacgacgactaccagctgccctacgtcgtcggcaacgggaccgagggatgcctgccggccttccctccgcaggtctttacgctgccgcagtacggttacgcgacgctgaaccgcgacaacacagaaaatcccaccgagaggagcagcttcttctgcctagagtactttcccagcaagatgctgagaacgggcaacaactttgagtttacctacaactttgaggaggtgcccttccactccagcttcgctcccagtcagaacctgttcaagctggccaacccgctggtggaccagtacttgtaccgcttcgtgagcacaaataacactggcggagtccagttcaacaagaacctggccgggagatacgccaacacctacaaaaactggttcccggggcccatgggccgaacccagggctggaacctgggctccggggtcaaccgcgccagtgtcagcgccttcgccacgaccaataggatggagctcgagggcgcgagttaccaggtgcccccgcagccgaacggcatgaccaacaacctccagggcagcaacacctatgccctggagaacactatgatcttcaacagccagccggcgaacccgggcaccaccgccacgtacctcgagggcaacatgctcatcaccagcgagagcgagacacagccggtgaaccgcgtggcgtacaacgtcggcgggcagatggccaccaacaaccagagctccaccactgcccccgcgaccggcacgtacaacctccaggaaatcgtgcccggcagcgtgtggatggagagggacgtgtacctccaaggacccatctgggccaagatcccagagacaggggcgcactttcacccctctccggccatgggcggattcggactcaaacacccaccgcccatgatgctcatcaagaacacgcctgtgcccggaaatatcaccagcttctcggacgtgcccgtcagcagcttcatcacccagtacagcaccgggcaggtcaccgtggagatggagtgggagctcaagaaggaaaactccaagaggtggaacccagagatccagtacacaaacaactacaacgacccccagtttgtggactttgccccggacagcaccggggaatacagaaccaccagacctatcggaacccgataccttacccgacccctttaa

SEQ ID NO: 75 - protein, 118 aa, Artificial Sequence
  synthetic sequence
LALRNQNPISSIKIKPVVLCCLVITISDPETGSIEESLSTGQTRSRESTTSRTTSSLRRETTPTSSTTTRTPSFRRSSPTTHPSGETSERQSFRPRKGFSNLLAWLKRVLRRPLPESG

SEQ ID NO: 76 - DNA, 357 bp, Artificial Sequence
  synthetic sequence
ctggcgctccgaaaccaaaacccaatcagcagcatcaagatcaagcccgtggtcttgtgctgcctggttataactatctcggacccggaaacgggctcgatcgaggagagcctgtcaacagggcagacgaggtcgcgcgagagcacgacatctcgtacaacgagcagcttgaggcgggagacaacccctacctcaagtacaaccacgcggacgccgagtttcaggagaagctcgccgacgacacatccttcgggggaaacctcggaaaggcagtctttcaggccaagaaaagggttctcgaaccttttggcctggttgaagagggtgctaagacggcccctaccggaaagcggatag

SEQ ID NO: 77 - protein, 724 aa, Artificial Sequence
  synthetic sequence
MSFVDHPPDWLEEVGEGLREFLGLEAGPPKPKPNQQHQDQARGLVLPGYNYLGPGNGLDRGEPVNRADEVAREHDISYNEQLNAGDNPYLKYNHADAEFQEKLADDTSFGGNLGKAVFQAKKRVLEPFGLVEEGAKTAPTGKRIDDHFPKRKKARTEEDSKPSTSSDAEAGPSGSQQLQIPAQPASSLGADTMSAGGGGPLGDNNQGADGVGNASGDWHCDSTWMGDRVVTKSTRTWVLPSYNNHQYREIKSGSVDGSNANAYFGYSTPWGYFDFNRFHSHWSPRDWQRLINNYWGFRPRSLRVKIFNIQVKEVTVQDSTTTIANNLTSTVQVFTDDDYQLPYVVGNGTEGCLPAFPPQVFTLPQYGYATLNRDNTENPTERSSFFCLEYFPSKMLRTGNNFEFTYNFEEVPFHSSFAPSQNLFKLANPLVDQYLYRFVSTNNTGGVQFNKNLAGRYANTYKNWFPGPMGRTQGWNLGSGVNRASVSAFATTNRMELEGASYQVPPQPNGMTNNLQGSNTYALENTMIFNSQPANPGTTATYLEGNMLITSESETQPVNRVAYNVGGQMATNNQSSTTAPATGTYNLQEIVPGSVWMERDVYLQGPIWAKIPETGAHFHPSPAMGGFGLKHPPPMMLIKNTPVPGNITSFSDVPVSSFITQYSTGQVTVEMEWELKKENSKRWNPEIQYTNNYNDPQFVDFAPDSTGEYRTTRPIGTRYLTRPL

SEQ ID NO: 78 - DNA, 2175 bp, Artificial Sequence
  synthetic sequence
atgtcttttgttgatcaccctccagattggttggaagaagttggtgaaggtcttcgcgagtttttgggccttgaagcgggcccaccgaaaccaaaacccaatcagcagcatcaagatcaagcccgtggtcttgtgctgcctggttataactatctcggacccggaaacgggctcgatcgaggagagcctgtcaacagggcagacgaggtcgcgcgagagcacgacatctcgtacaacgagcagcttaatgcgggagacaacccctacctcaagtacaaccacgcggacgccgagtttcaggagaagctcgccgacgacacatccttcgggggaaacctcggaaaggcagtctttcaggccaagaaaagggttctcgaaccttttggcctggttgaagagggtgctaagacggcccctaccggaaagcggatagacgaccactttccaaaaagaaagaaggctcggaccgaagaggactccaagccttccacctcgtcagacgccgaagctggacccagcggatcccagcagctgcaaatcccagcccaaccagcctcaagtttgggagctgatacaatgtctgcgggaggtggcggcccattgggcgacaataaccaaggtgccgatggagtgggcaatgcctcgggagattggcattgcgattccacgtggatgggggacagagtcgtcaccaagtccacccgaacctgggtgctgcccagctacaacaaccaccagtaccgagagatcaaaagcggctccgtcgacggaagcaacgccaacgcctactttggatacagcaccccctgggggtactttgactttaaccgcttccacagccactggagcccccgagactggcaaagactcatcaacaactactggggcttcagaccccggtccctcagagtcaaaatcttcaacattcaagtcaaagaggtcacggtgcaggactccaccaccaccatcgccaacaacctcacctccaccgtccaagtgtttacggacgacgactaccagctgccctacgtcgtcggcaacgggaccgagggatgcctgccggccttccctccgcaggtctttacgctgccgcagtacggttacgcgacgctgaaccgcgacaacacagaaaatcccaccgagaggagcagcttcttctgcctagagtactttcccagcaagatgctgagaacgggcaacaactttgagtttacctacaactttgaggaggtgcccttccactccagcttcgctcccagtcagaacctgttcaagctggccaacccgctggtggaccagtacttgtaccgcttcgtgagcacaaataacactggcggagtccagttcaacaagaacctggccgggagatacgccaacacctacaaaaactggttcccggggcccatgggccgaacccagggctggaacctgggctccggggtcaaccgcgccagtgtcagcgccttcgccacgaccaataggatggagctcgagggcgcgagttaccaggtgcccccgcagccgaacggcatgaccaacaacctccagggcagcaacacctatgccctggagaacactatgatcttcaacagccagccggcgaacccgggcaccaccgccacgtacctcgagggcaacatgctcatcaccagcgagagcgagacacagccggtgaaccgcgtggcgtacaacgtcggcgggcagatggccaccaacaaccagagctccaccactgcccccgcgaccggcacgtacaacctccaggaaatcgtgcccggcagcgtgtggatggagagggacgtgtacctccaaggacccatctgggccaagatcccagagacaggggcgcactttcacccctctccggccatgggcggattcggactcaaacacccaccgcccatgatgctcatcaagaacacgcctgtgcccggaaatatcaccagcttctcggacgtgcccgtcagcagcttcatcacccagtacagcaccgggcaggtcaccgtggagatggagtgggagctcaagaaggaaaactccaagaggtggaacccagagatccagtacacaaacaactacaacgacccccagtttgtggactttgccccggacagcaccggggaatacagaaccaccagacctatcggaacccgataccttacccgacccctttaa

SEQ ID NO: 79 - protein, 61 aa, Artificial Sequence; identical to SEQ ID NO: 35
  synthetic sequence

SEQ ID NO: 80 - DNA, 186 bp, Artificial Sequence; identical to SEQ ID NO: 36
  synthetic sequence

SEQ ID NO: 81 - protein, 725 aa, Artificial Sequence
  synthetic sequence
MSFVDHPPDWLEDEVGEGLREWLKLEAGPPKPKPNEQHQDQARGLVLPGYNYLGPGNGLDRGEPVNRADEVAREHDISYNEQLEAGDNPYLKYNHADAEFQEKLADDTSFGGNLGKAVFQAKKRVLEPFGLVEEGAKTAPTGKRIDDHFPKRKKARTEEDSKPSTSSDAEAGPSGSQQLQIPAQPASSLGADTMSAGGGGPLGDNNQGADGVGNASGDWHCDSTWMGDRVVTKSTRTWVLPSYNNHQYREIKSGSVDGSNANAYFGYSTPWGYFDFNRFHSHWSPRDWQRLINNYWGFRPRSLRVKIFNIQVKEVTVQDSTTTIANNLTSTVQVFTDDDYQLPYVVGNGTEGCLPAFPPQVFTLPQYGYATLNRDNTENPTERSSFFCLEYFPSKMLRTGNNFEFTYNFEEVPFHSSFAPSQNLFKLANPLVDQYLYRFVSTNNTGGVQFNKNLAGRYANTYKNWFPGPMGRTQGWNLGSGVNRASVSAFATTNRMELEGASYQVPPQPNGMTNNLQGSNTYALENTMIFNSQPANPGTTATYLEGNMLITSESETQPVNRVAYNVGGQMATNNQSSTTAPATGTYNLQEIVPGSVWMERDVYLQGPIWAKIPETGAHFHPSPAMGGFGLKHPPPMMLIKNTPVPGNITSFSDVPVSSFITQYSTGQVTVEMEWELKKENSKRWNPEIQYTNNYNDPQFVDFAPDSTGEYRTTRPIGTRYLTRPL

SEQ ID NO: 82 - DNA, 2178 bp, Artificial Sequence
  synthetic sequence
atgtcttttgttgatcaccctccagattggttggaagatgaagttggtgaaggccttcgcgagtggttgaagctggaagcgggcccaccgaaaccaaaacccaatgagcagcatcaagatcaagcccgtggtcttgtgctgcctggttataactatctcggacccggaaacgggctcgatcgaggagagcctgtcaacagggcagacgaggtcgcgcgagagcacgacatctcgtacaacgagcagcttgaggcgggagacaacccctacctcaagtacaaccacgcggacgccgagtttcaggagaagctcgccgacgacacatccttcgggggaaacctcggaaaggcagtctttcaggccaagaaaagggttctcgaaccttttggcctggttgaagagggtgctaagacggcccctaccggaaagcggatagacgaccactttccaaaaagaaagaaggctcggaccgaagaggactccaagccttccacctcgtcagacgccgaagctggacccagcggatcccagcagctgcaaatcccagcccaaccagcctcaagtttgggagctgatacaatgtctgcgggaggtggcggcccattgggcgacaataaccaaggtgccgatggagtgggcaatgcctcgggagattggcattgcgattccacgtggatgggggacagagtcgtcaccaagtccacccgaacctgggtgctgcccagctacaacaaccaccagtaccgagagatcaaaagcggctccgtcgacggaagcaacgccaacgcctactttggatacagcaccccctgggggtactttgactttaaccgcttccacagccactggagcccccgagactggcaaagactcatcaacaactactggggcttcagaccccggtccctcagagtcaaaatcttcaacattcaagtcaaagaggtcacggtgcaggactccaccaccaccatcgccaacaacctcacctccaccgtccaagtgtttacggacgacgactaccagctgccctacgtcgtcggcaacgggaccgagggatgcctgccggccttccctccgcaggtctttacgctgccgcagtacggttacgcgacgctgaaccgcgacaacacagaaaatcccaccgagaggagcagcttcttctgcctagagtactttcccagcaagatgctgagaacgggcaacaactttgagtttacctacaactttgaggaggtgcccttccactccagcttcgctcccagtcagaacctgttcaagctggccaacccgctggtggaccagtacttgtaccgcttcgtgagcacaaataacactggcggagtccagttcaacaagaacctggccgggagatacgccaacacctacaaaaactggttcccggggcccatgggccgaacccagggctggaacctgggctccggggtcaaccgcgccagtgtcagcgccttcgccacgaccaataggatggagctcgagggcgcgagttaccaggtgcccccgcagccgaacggcatgaccaacaacctccagggcagcaacacctatgccctggagaacactatgatcttcaacagccagccggcgaacccgggcaccaccgccacgtacctcgagggcaacatgctcatcaccagcgagagcgagacacagccggtgaaccgcgtggcgtacaacgtcggcgggcagatggccaccaacaaccagagctccaccactgcccccgcgaccggcacgtacaacctccaggaaatcgtgcccggcagcgtgtggatggagagggacgtgtacctccaaggacccatctgggccaagatcccagagacaggggcgcactttcacccctctccggccatgggcggattcggactcaaacacccaccgcccatgatgctcatcaagaacacgcctgtgcccggaaatatcaccagcttctcggacgtgcccgtcagcagcttcatcacccagtacagcaccgggcaggtcaccgtggagatggagtgggagctcaagaaggaaaactccaagaggtggaacccagagatccagtacacaaacaactacaacgacccccagtttgtggactttgccccggacagcaccggggaatacagaaccaccagacctatcggaacccgataccttacccgacccctttaa

SEQ ID NO: 83 - protein, 110 aa, Artificial Sequence
  synthetic sequence
MSSIKIKPVVLCCLVITISDPETGSIEESLSTGQTRSRESTTSRTTSSLRRETTPTSSTTTRTPSFRRSSPTTHPSGETSERQSFRPRKGFSNLLAWLKRVLRRPLPESG

SEQ ID NO: 84 - DNA, 333 bp, Artificial Sequence
  synthetic sequence
atgagcagcatcaagatcaagcccgtggtcttgtgctgcctggttataactatctcggacccggaaacgggctcgatcgaggagagcctgtcaacagggcagacgaggtcgcgcgagagcacgacatctcgtacaacgagcagcttgaggcgggagacaacccctacctcaagtacaaccacgcggacgccgagtttcaggagaagctcgccgacgacacatccttcgggggaaacctcggaaaggcagtctttcaggccaagaaaagggttctcgaaccttttggcctggttgaagagggtgctaagacggcccctaccggaaagcggatag

SEQ ID NO: 85 - protein, 724 aa, Artificial Sequence
  synthetic sequence
MSFVDHPPDWLEEVGDGLREFLGLEAGPPKPKPSQQHQDQARGLVLPGYNYLGPGNGLDRGEPVNRADEVAREHDISYNEQLEAGDNPYLKYNHADAEFQEKLADDTSFGGNLGKAVFQAKKRVLEPFGLVEEGAKTAPTGKRIDDHFPKRKKARTEEDSKPSTSSDAEAGPSGSQQLQIPAQPASSLGADTMSAGGGGPLGDNNQGADGVGNASGDWHCDSTWMGDRVVTKSTRTWVLPSYNNHQYREIKSGSVDGSNANAYFGYSTPWGYFDFNRFHSHWSPRDWQRLINNYWGFRPRSLRVKIFNIQVKEVTVQDSTTTIANNLTSTVQVFTDDDYQLPYVVGNGTEGCLPAFPPQVFTLPQYGYATLNRDNTENPTERSSFFCLEYFPSKMLRTGNNFEFTYNFEEVPFHSSFAPSQNLFKLANPLVDQYLYRFVSTNNTGGVQFNKNLAGRYANTYKNWFPGPMGRTQGWNLGSGVNRASVSAFATTNRMELEGASYQVPPQPNGMTNNLQGSNTYALENTMIFNSQPANPGTTATYLEGNMLITSESETQPVNRVAYNVGGQMATNNQSSTTAPATGTYNLQEIVPGSVWMERDVYLQGPIWAKIPETGAHFHPSPAMGGFGLKHPPPMMLIKNTPVPGNITSFSDVPVSSFITQYSTGQVTVEMEWELKKENSKRWNPEIQYTNNYNDPQFVDFAPDSTGEYRTTRPIGTRYLTRPL

SEQ ID NO: 86 - DNA, 2175 bp, Artificial Sequence
  synthetic sequence
atgtcttttgttgatcaccctccagattggttggaagaagttggtgatggtctgcgcgagtttttgggccttgaagcgggcccaccgaaaccaaaaccctctcagcagcatcaagatcaagcccgtggtcttgtgctgcctggttataactatctcggacccggaaacgggctcgatcgaggagagcctgtcaacagggcagacgaggtcgcgcgagagcacgacatctcgtacaacgagcagcttgaggcgggagacaacccctacctcaagtacaaccacgcggacgccgagtttcaggagaagctcgccgacgacacatccttcgggggaaacctcggaaaggcagtctttcaggccaagaaaagggttctcgaaccttttggcctggttgaagagggtgctaagacggcccctaccggaaagcggatagacgaccactttccaaaaagaaagaaggctcggaccgaagaggactccaagccttccacctcgtcagacgccgaagctggacccagcggatcccagcagctgcaaatcccagcccaaccagcctcaagtttgggagctgatacaatgtctgcgggaggtggcggcccattgggcgacaataaccaaggtgccgatggagtgggcaatgcctcgggagattggcattgcgattccacgtggatgggggacagagtcgtcaccaagtccacccgaacctgggtgctgcccagctacaacaaccaccagtaccgagagatcaaaagcggctccgtcgacggaagcaacgccaacgcctactttggatacagcaccccctgggggtactttgactttaaccgcttccacagccactggagcccccgagactggcaaagactcatcaacaactactggggcttcagaccccggtccctcagagtcaaaatcttcaacattcaagtcaaagaggtcacggtgcaggactccaccaccaccatcgccaacaacctcacctccaccgtccaagtgtttacggacgacgactaccagctgccctacgtcgtcggcaacgggaccgagggatgcctgccggccttccctccgcaggtctttacgctgccgcagtacggttacgcgacgctgaaccgcgacaacacagaaaatcccaccgagaggagcagcttcttctgcctagagtactttcccagcaagatgctgagaacgggcaacaactttgagtttacctacaactttgaggaggtgcccttccactccagcttcgctcccagtcagaacctgttcaagctggccaacccgctggtggaccagtacttgtaccgcttcgtgagcacaaataacactggcggagtccagttcaacaagaacctggccgggagatacgccaacacctacaaaaactggttcccggggcccatgggccgaacccagggctggaacctgggctccggggtcaaccgcgccagtgtcagcgccttcgccacgaccaataggatggagctcgagggcgcgagttaccaggtgcccccgcagccgaacggcatgaccaacaacctccagggcagcaacacctatgccctggagaacactatgatcttcaacagccagccggcgaacccgggcaccaccgccacgtacctcgagggcaacatgctcatcaccagcgagagcgagacacagccggtgaaccgcgtggcgtacaacgtcggcgggcagatggccaccaacaaccagagctccaccactgcccccgcgaccggcacgtacaacctccaggaaatcgtgcccggcagcgtgtggatggagagggacgtgtacctccaaggacccatctgggccaagatcccagagacaggggcgcactttcacccctctccggccatgggcggattcggactcaaacacccaccgcccatgatgctcatcaagaacacgcctgtgcccggaaatatcaccagcttctcggacgtgcccgtcagcagcttcatcacccagtacagcaccgggcaggtcaccgtggagatggagtgggagctcaagaaggaaaactccaagaggtggaacccagagatccagtacacaaacaactacaacgacccccagtttgtggactttgccccggacagcaccggggaatacagaaccaccagacctatcggaacccgataccttacccgacccctttaa

SEQ ID NO: 87 - protein, 128 aa, Artificial Sequence
  synthetic sequence
MVCASFWALKRAHRNQNPLSSIKIKPVVLCCLVITISDPETGSIEESLSTGQTRSRESTTSRTTSSLRRETTPTSSTTTRTPSFRRSSPTTHPSGETSERQSFRPRKGFSNLLAWLKRVLRRPLPESG

SEQ ID NO: 88 - DNA, 387 bp, Artificial Sequence
  synthetic sequence
atggtctgcgcgagtttttgggccttgaagcgggcccaccgaaaccaaaaccctctcagcagcatcaagatcaagcccgtggtcttgtgctgcctggttataactatctcggacccggaaacgggctcgatcgaggagagcctgtcaacagggcagacgaggtcgcgcgagagcacgacatctcgtacaacgagcagcttgaggcgggagacaacccctacctcaagtacaaccacgcggacgccgagtttcaggagaagctcgccgacgacacatccttcgggggaaacctcggaaaggcagtctttcaggccaagaaaagggttctcgaaccttttggcctggttgaagagggtgctaagacggcccctaccggaaagcggatag

SEQ ID NO: 89 - protein, 724 aa, Artificial Sequence
  synthetic sequence
MSFVDHPPDWLHEVGEGLREFLGLHAGPPKPKPNQQHQDQARGLVLPGYNYLGPGNGLDRGEPVNRADEVAREHDISYNEQLEAGDNPYLKYNHADAEFQEKLADDTSFGGNLGKAVFQAKKRVLEPFGLVEEGAKTAPTGKRIDDHFPKRKKARTEEDSKPSTSSDAEAGPSGSQQLQIPAQPASSLGADTMSAGGGGPLGDNNQGADGVGNASGDWHCDSTWMGDRVVTKSTRTWVLPSYNNHQYREIKSGSVDGSNANAYFGYSTPWGYFDFNRFHSHWSPRDWQRLINNYWGFRPRSLRVKIFNIQVKEVTVQDSTTTIANNLTSTVQVFTDDDYQLPYVVGNGTEGCLPAFPPQVFTLPQYGYATLNRDNTENPTERSSFFCLEYFPSKMLRTGNNFEFTYNFEEVPFHSSFAPSQNLFKLANPLVDQYLYRFVSTNNTGGVQFNKNLAGRYANTYKNWFPGPMGRTQGWNLGSGVNRASVSAFATTNRMELEGASYQVPPQPNGMTNNLQGSNTYALENTMIFNSQPANPGTTATYLEGNMLITSESETQPVNRVAYNVGGQMATNNQSSTTAPATGTYNLQEIVPGSVWMERDVYLQGPIWAKIPETGAHFHPSPAMGGFGLKHPPPMMLIKNTPVPGNITSFSDVPVSSFITQYSTGQVTVEMEWELKKENSKRWNPEIQYTNNYNDPQFVDFAPDSTGEYRTTRPIGTRYLTRPL

SEQ ID NO: 90 - DNA, 2175 bp, Artificial Sequence
  synthetic sequence
atgtcttttgttgatcaccctccagattggttgcatgaagttggtgaagggcttcgcgagtttttgggccttcacgcgggcccaccgaaaccaaaacccaatcagcagcatcaagatcaagcccgtggtcttgtgctgcctggttataactatctcggacccggaaacgggctcgatcgaggagagcctgtcaacagggcagacgaggtcgcgcgagagcacgacatctcgtacaacgagcagcttgaggcgggagacaacccctacctcaagtacaaccacgcggacgccgagtttcaggagaagctcgccgacgacacatccttcgggggaaacctcggaaaggcagtctttcaggccaagaaaagggttctcgaaccttttggcctggttgaagagggtgctaagacggcccctaccggaaagcggatagacgaccactttccaaaaagaaagaaggctcggaccgaagaggactccaagccttccacctcgtcagacgccgaagctggacccagcggatcccagcagctgcaaatcccagcccaaccagcctcaagtttgggagctgatacaatgtctgcgggaggtggcggcccattgggcgacaataaccaaggtgccgatggagtgggcaatgcctcgggagattggcattgcgattccacgtggatgggggacagagtcgtcaccaagtccacccgaacctgggtgctgcccagctacaacaaccaccagtaccgagagatcaaaagcggctccgtcgacggaagcaacgccaacgcctactttggatacagcaccccctgggggtactttgactttaaccgcttccacagccactggagcccccgagactggcaaagactcatcaacaactactggggcttcagaccccggtccctcagagtcaaaatcttcaacattcaagtcaaagaggtcacggtgcaggactccaccaccaccatcgccaacaacctcacctccaccgtccaagtgtttacggacgacgactaccagctgccctacgtcgtcggcaacgggaccgagggatgcctgccggccttccctccgcaggtctttacgctgccgcagtacggttacgcgacgctgaaccgcgacaacacagaaaatcccaccgagaggagcagcttcttctgcctagagtactttcccagcaagatgctgagaacgggcaacaactttgagtttacctacaactttgaggaggtgcccttccactccagcttcgctcccagtcagaacctgttcaagctggccaacccgctggtggaccagtacttgtaccgcttcgtgagcacaaataacactggcggagtccagttcaacaagaacctggccgggagatacgccaacacctacaaaaactggttcccggggcccatgggccgaacccagggctggaacctgggctccggggtcaaccgcgccagtgtcagcgccttcgccacgaccaataggatggagctcgagggcgcgagttaccaggtgcccccgcagccgaacggcatgaccaacaacctccagggcagcaacacctatgccctggagaacactatgatcttcaacagccagccggcgaacccgggcaccaccgccacgtacctcgagggcaacatgctcatcaccagcgagagcgagacacagccggtgaaccgcgtggcgtacaacgtcggcgggcagatggccaccaacaaccagagctccaccactgcccccgcgaccggcacgtacaacctccaggaaatcgtgcccggcagcgtgtggatggagagggacgtgtacctccaaggacccatctgggccaagatcccagagacaggggcgcactttcacccctctccggccatgggcggattcggactcaaacacccaccgcccatgatgctcatcaagaacacgcctgtgcccggaaatatcaccagcttctcggacgtgcccgtcagcagcttcatcacccagtacagcaccgggcaggtcaccgtggagatggagtgggagctcaagaaggaaaactccaagaggtggaacccagagatccagtacacaaacaactacaacgacccccagtttgtggactttgccccggacagcaccggggaatacagaaccaccagacctatcggaacccgataccttacccgacccctttaa

SEQ ID NO: 91 - protein, 132 aa, Artificial Sequence
  synthetic sequence
MKLVKGFASFWAFTRAHRNQNPISSIKIKPVVLCCLVITISDPETGSIEESLSTGQTRSRESTTSRTTSSLRRETTPTSSTTTRTPSFRRSSPTTHPSGETSERQSFRPRKGFSNLLAWLKRVLRRPLPESG

SEQ ID NO: 92 - DNA, 399 bp, Artificial Sequence
  synthetic sequence
atgaagttggtgaagggcttcgcgagtttttgggccttcacgcgggcccaccgaaaccaaaacccaatcagcagcatcaagatcaagcccgtggtcttgtgctgcctggttataactatctcggacccggaaacgggctcgatcgaggagagcctgtcaacagggcagacgaggtcgcgcgagagcacgacatctcgtacaacgagcagcttgaggcgggagacaacccctacctcaagtacaaccacgcggacgccgagtttcaggagaagctcgccgacgacacatccttcgggggaaacctcggaaaggcagtctttcaggccaagaaaagggttctcgaaccttttggcctggttgaagagggtgctaagacggcccctaccggaaagcggatag

SEQ ID NO: 93 - protein, 724 aa, Artificial Sequence
  synthetic sequence
MSFVDHPPDWLEEVGEGLREFLGLEAGPPKPKPNQQHYDQARGLVLPGYNYLGPGNGLDRGEPVNRADEVAREHDISYNEQLEAGDNPYLKYNHADAEFQEKLADDTSFGGNLGKAVFQAKKRVLEPFGLVEEGAKTAPTGKRIDDHFPKRKKARTEEDSKPSTSSDAEAGPSGSQQLQIPAQPASSLGADTMSAGGGGPLGDNNQGADGVGNASGDWHCDSTWMGDRVVTKSTRTWVLPSYNNHQYREIKSGSVDGSNANAYFGYSTPWGYFDFNRFHSHWSPRDWQRLINNYWGFRPRSLRVKIFNIQVKEVTVQDSTTTIANNLTSTVQVFTDDDYQLPYVVGNGTEGCLPAFPPQVFTLPQYGYATLNRDNTENPTERSSFFCLEYFPSKMLRTGNNFEFTYNFEEVPFHSSFAPSQNLFKLANPLVDQYLYRFVSTNNTGGVQFNKNLAGRYANTYKNWFPGPMGRTQGWNLGSGVNRASVSAFATTNRMELEGASYQVPPQPNGMTNNLQGSNTYALENTMIFNSQPANPGTTATYLEGNMLITSESETQPVNRVAYNVGGQMATNNQSSTTAPATGTYNLQEIVPGSVWMERDVYLQGPIWAKIPETGAHFHPSPAMGGFGLKHPPPMMLIKNTPVPGNITSFSDVPVSSFITQYSTGQVTVEMEWELKKENSKRWNPEIQYTNNYNDPQFVDFAPDSTGEYRTTRPIGTRYLTRPL

SEQ ID NO: 94 - DNA, 2175 bp, Artificial Sequence
  synthetic sequence
atgtcttttgttgatcaccctccagattggttggaagaagttggtgaaggtcttcgcgagtttttgggccttgaagcgggcccaccgaaaccaaaacccaatcagcagcattatgatcaagcccgtggtcttgtgctgcctggttataactatctcggacccggaaacgggctcgatcgaggagagcctgtcaacagggcagacgaggtcgcgcgagagcacgacatctcgtacaacgagcagcttgaggcgggagacaacccctacctcaagtacaaccacgcggacgccgagtttcaggagaagctcgccgacgacacatccttcgggggaaacctcggaaaggcagtctttcaggccaagaaaagggttctcgaaccttttggcctggttgaagagggtgctaagacggcccctaccggaaagcggatagacgaccactttccaaaaagaaagaaggctcggaccgaagaggactccaagccttccacctcgtcagacgccgaagctggacccagcggatcccagcagctgcaaatcccagcccaaccagcctcaagtttgggagctgatacaatgtctgcgggaggtggcggcccattgggcgacaataaccaaggtgccgatggagtgggcaatgcctcgggagattggcattgcgattccacgtggatgggggacagagtcgtcaccaagtccacccgaacctgggtgctgcccagctacaacaaccaccagtaccgagagatcaaaagcggctccgtcgacggaagcaacgccaacgcctactttggatacagcaccccctgggggtactttgactttaaccgcttccacagccactggagcccccgagactggcaaagactcatcaacaactactggggcttcagaccccggtccctcagagtcaaaatcttcaacattcaagtcaaagaggtcacggtgcaggactccaccaccaccatcgccaacaacctcacctccaccgtccaagtgtttacggacgacgactaccagctgccctacgtcgtcggcaacgggaccgagggatgcctgccggccttccctccgcaggtctttacgctgccgcagtacggttacgcgacgctgaaccgcgacaacacagaaaatcccaccgagaggagcagcttcttctgcctagagtactttcccagcaagatgctgagaacgggcaacaactttgagtttacctacaactttgaggaggtgcccttccactccagcttcgctcccagtcagaacctgttcaagctggccaacccgctggtggaccagtacttgtaccgcttcgtgagcacaaataacactggcggagtccagttcaacaagaacctggccgggagatacgccaacacctacaaaaactggttcccggggcccatgggccgaacccagggctggaacctgggctccggggtcaaccgcgccagtgtcagcgccttcgccacgaccaataggatggagctcgagggcgcgagttaccaggtgcccccgcagccgaacggcatgaccaacaacctccagggcagcaacacctatgccctggagaacactatgatcttcaacagccagccggcgaacccgggcaccaccgccacgtacctcgagggcaacatgctcatcaccagcgagagcgagacacagccggtgaaccgcgtggcgtacaacgtcggcgggcagatggccaccaacaaccagagctccaccactgcccccgcgaccggcacgtacaacctccaggaaatcgtgcccggcagcgtgtggatggagagggacgtgtacctccaaggacccatctgggccaagatcccagagacaggggcgcactttcacccctctccggccatgggcggattcggactcaaacacccaccgcccatgatgctcatcaagaacacgcctgtgcccggaaatatcaccagcttctcggacgtgcccgtcagcagcttcatcacccagtacagcaccgggcaggtcaccgtggagatggagtgggagctcaagaaggaaaactccaagaggtggaacccagagatccagtacacaaacaactacaacgacccccagtttgtggactttgccccggacagcaccggggaatacagaaccaccagacctatcggaacccgataccttacccgacccctttaa

SEQ ID NO: 95 - protein, 106 aa, Artificial Sequence
  synthetic sequence
MIKPVVLCCLVITISDPETGSIEESLSTGQTRSRESTTSRTTSSLRRETTPTSSTTTRTPSFRRSSPTTHPSGETSERQSFRPRKGFSNLLAWLKRVLRRPLPESG

SEQ ID NO: 96 - DNA, 321 bp, Artificial Sequence
  synthetic sequence
atgatcaagcccgtggtcttgtgctgcctggttataactatctcggacccggaaacgggctcgatcgaggagagcctgtcaacagggcagacgaggtcgcgcgagagcacgacatctcgtacaacgagcagcttgaggcgggagacaacccctacctcaagtacaaccacgcggacgccgagtttcaggagaagctcgccgacgacacatccttcgggggaaacctcggaaaggcagtctttcaggccaagaaaagggttctcgaaccttttggcctggttgaagagggtgctaagacggcccctaccggaaagcggatag

SEQ ID NO: 97 - protein, 724 aa, Artificial Sequence
  synthetic sequence
MSFVDHPPDWLEEVGEGLREFLGLEAGPPKPKPNQQHQDQARGLVLPGYNYLGPGNGLDRGEPVNEADAAAREHDISYNEQLDAGDNPYLKYNHADAEFQEKLADDTSFGGNLGKAVFQAKKRVLEPFGLVEEGAKTAPTGKRIDDHFPKRKKARTEEDSKPSTSSDAEAGPSGSQQLQIPAQPASSLGADTMSAGGGGPLGDNNQGADGVGNASGDWHCDSTWMGDRVVTKSTRTWVLPSYNNHQYREIKSGSVDGSNANAYFGYSTPWGYFDFNRFHSHWSPRDWQRLINNYWGFRPRSLRVKIFNIQVKEVTVQDSTTTIANNLTSTVQVFTDDDYQLPYVVGNGTEGCLPAFPPQVFTLPQYGYATLNRDNTENPTERSSFFCLEYFPSKMLRTGNNFEFTYNFEEVPFHSSFAPSQNLFKLANPLVDQYLYRFVSTNNTGGVQFNKNLAGRYANTYKNWFPGPMGRTQGWNLGSGVNRASVSAFATTNRMELEGASYQVPPQPNGMTNNLQGSNTYALENTMIFNSQPANPGTTATYLEGNMLITSESETQPVNRVAYNVGGQMATNNQSSTTAPATGTYNLQEIVPGSVWMERDVYLQGPIWAKIPETGAHFHPSPAMGGFGLKHPPPMMLIKNTPVPGNITSFSDVPVSSFITQYSTGQVTVEMEWELKKENSKRWNPEIQYTNNYNDPQFVDFAPDSTGEYRTTRPIGTRYLTRPL

SEQ ID NO: 98 - DNA, 2175 bp, Artificial Sequence
  synthetic sequence
atgtcttttgttgatcaccctccagattggttggaagaagttggtgaaggtcttcgcgagtttttgggccttgaagcgggcccaccgaaaccaaaacccaatcagcagcatcaagatcaagcccgtggtcttgtgctgcctggttataactatctcggacccggaaacgggctcgatcgaggagagcctgtcaacgaagcagacgccgcagcgcgagagcacgacatctcgtacaacgagcagcttgatgcgggagacaacccctacctcaagtacaaccacgcggacgccgagtttcaggagaagctcgccgacgacacatccttcgggggaaacctcggaaaggcagtctttcaggccaagaaaagggttctcgaaccttttggcctggttgaagagggtgctaagacggcccctaccggaaagcggatagacgaccactttccaaaaagaaagaaggctcggaccgaagaggactccaagccttccacctcgtcagacgccgaagctggacccagcggatcccagcagctgcaaatcccagcccaaccagcctcaagtttgggagctgatacaatgtctgcgggaggtggcggcccattgggcgacaataaccaaggtgccgatggagtgggcaatgcctcgggagattggcattgcgattccacgtggatgggggacagagtcgtcaccaagtccacccgaacctgggtgctgcccagctacaacaaccaccagtaccgagagatcaaaagcggctccgtcgacggaagcaacgccaacgcctactttggatacagcaccccctgggggtactttgactttaaccgcttccacagccactggagcccccgagactggcaaagactcatcaacaactactggggcttcagaccccggtccctcagagtcaaaatcttcaacattcaagtcaaagaggtcacggtgcaggactccaccaccaccatcgccaacaacctcacctccaccgtccaagtgtttacggacgacgactaccagctgccctacgtcgtcggcaacgggaccgagggatgcctgccggccttccctccgcaggtctttacgctgccgcagtacggttacgcgacgctgaaccgcgacaacacagaaaatcccaccgagaggagcagcttcttctgcctagagtactttcccagcaagatgctgagaacgggcaacaactttgagtttacctacaactttgaggaggtgcccttccactccagcttcgctcccagtcagaacctgttcaagctggccaacccgctggtggaccagtacttgtaccgcttcgtgagcacaaataacactggcggagtccagttcaacaagaacctggccgggagatacgccaacacctacaaaaactggttcccggggcccatgggccgaacccagggctggaacctgggctccggggtcaaccgcgccagtgtcagcgccttcgccacgaccaataggatggagctcgagggcgcgagttaccaggtgcccccgcagccgaacggcatgaccaacaacctccagggcagcaacacctatgccctggagaacactatgatcttcaacagccagccggcgaacccgggcaccaccgccacgtacctcgagggcaacatgctcatcaccagcgagagcgagacacagccggtgaaccgcgtggcgtacaacgtcggcgggcagatggccaccaacaaccagagctccaccactgcccccgcgaccggcacgtacaacctccaggaaatcgtgcccggcagcgtgtggatggagagggacgtgtacctccaaggacccatctgggccaagatcccagagacaggggcgcactttcacccctctccggccatgggcggattcggactcaaacacccaccgcccatgatgctcatcaagaacacgcctgtgcccggaaatatcaccagcttctcggacgtgcccgtcagcagcttcatcacccagtacagcaccgggcaggtcaccgtggagatggagtgggagctcaagaaggaaaactccaagaggtggaacccagagatccagtacacaaacaactacaacgacccccagtttgtggactttgccccggacagcaccggggaatacagaaccaccagacctatcggaacccgataccttacccgacccctttaa

SEQ ID NO: 99 - protein, 61 aa, Artificial Sequence; identical to SEQ ID NO: 35
  synthetic sequence

SEQ ID NO: 100 - DNA, 186 bp, Artificial Sequence; identical to SEQ ID NO: 36
  synthetic sequence

SEQ ID NO: 101 - protein, 724 aa, Artificial Sequence
  synthetic sequence
MSFVDHPPDWLEEVGEGLREFLGLEAGPPKPKPNEQHKDQARGLVLPGYNYLGPFNGLDRGEPVNRADEVAREHDISYNEQLEAGDNPYLKYNHADAEFQEKLADDTSFGGNLGKAVFQAKKRVLEPFGLVEEGAKTAPTGKRIDDHFPKRKKARTEEDSKPSTSSDAEAGPSGSQQLQIPAQPASSLGADTMSAGGGGPLGDNNQGADGVGNASGDWHCDSTWMGDRVVTKSTRTWVLPSYNNHQYREIKSGSVDGSNANAYFGYSTPWGYFDFNRFHSHWSPRDWQRLINNYWGFRPRSLRVKIFNIQVKEVTVQDSTTTIANNLTSTVQVFTDDDYQLPYVVGNGTEGCLPAFPPQVFTLPQYGYATLNRDNTENPTERSSFFCLEYFPSKMLRTGNNFEFTYNFEEVPFHSSFAPSQNLFKLANPLVDQYLYRFVSTNNTGGVQFNKNLAGRYANTYKNWFPGPMGRTQGWNLGSGVNRASVSAFATTNRMELEGASYQVPPQPNGMTNNLQGSNTYALENTMIFNSQPANPGTTATYLEGNMLITSESETQPVNRVAYNVGGQMATNNQSSTTAPATGTYNLQEIVPGSVWMERDVYLQGPIWAKIPETGAHFHPSPAMGGFGLKHPPPMMLIKNTPVPGNITSFSDVPVSSFITQYSTGQVTVEMEWELKKENSKRWNPEIQYTNNYNDPQFVDFAPDSTGEYRTTRPIGTRYLTRPL

SEQ ID NO: 102 - DNA, 2175 bp, Artificial Sequence
  synthetic sequence
atgtcttttgttgatcaccctccagattggttggaagaagttggtgaaggtcttcgcgagtttttgggccttgaagcgggcccaccgaaaccaaaacccaatgagcagcataaggatcaagcccgtggtcttgtgctgcctggttataactatctcggacccttcaacgggctcgatcgaggagagcctgtcaacagggcagacgaggtcgcgcgagagcacgacatctcgtacaacgagcagcttgaggcgggagacaacccctacctcaagtacaaccacgcggacgccgagtttcaggagaagctcgccgacgacacatccttcgggggaaacctcggaaaggcagtctttcaggccaagaaaagggttctcgaaccttttggcctggttgaagagggtgctaagacggcccctaccggaaagcggatagacgaccactttccaaaaagaaagaaggctcggaccgaagaggactccaagccttccacctcgtcagacgccgaagctggacccagcggatcccagcagctgcaaatcccagcccaaccagcctcaagtttgggagctgatacaatgtctgcgggaggtggcggcccattgggcgacaataaccaaggtgccgatggagtgggcaatgcctcgggagattggcattgcgattccacgtggatgggggacagagtcgtcaccaagtccacccgaacctgggtgctgcccagctacaacaaccaccagtaccgagagatcaaaagcggctccgtcgacggaagcaacgccaacgcctactttggatacagcaccccctgggggtactttgactttaaccgcttccacagccactggagcccccgagactggcaaagactcatcaacaactactggggcttcagaccccggtccctcagagtcaaaatcttcaacattcaagtcaaagaggtcacggtgcaggactccaccaccaccatcgccaacaacctcacctccaccgtccaagtgtttacggacgacgactaccagctgccctacgtcgtcggcaacgggaccgagggatgcctgccggccttccctccgcaggtctttacgctgccgcagtacggttacgcgacgctgaaccgcgacaacacagaaaatcccaccgagaggagcagcttcttctgcctagagtactttcccagcaagatgctgagaacgggcaacaactttgagtttacctacaactttgaggaggtgcccttccactccagcttcgctcccagtcagaacctgttcaagctggccaacccgctggtggaccagtacttgtaccgcttcgtgagcacaaataacactggcggagtccagttcaacaagaacctggccgggagatacgccaacacctacaaaaactggttcccggggcccatgggccgaacccagggctggaacctgggctccggggtcaaccgcgccagtgtcagcgccttcgccacgaccaataggatggagctcgagggcgcgagttaccaggtgcccccgcagccgaacggcatgaccaacaacctccagggcagcaacacctatgccctggagaacactatgatcttcaacagccagccggcgaacccgggcaccaccgccacgtacctcgagggcaacatgctcatcaccagcgagagcgagacacagccggtgaaccgcgtggcgtacaacgtcggcgggcagatggccaccaacaaccagagctccaccactgcccccgcgaccggcacgtacaacctccaggaaatcgtgcccggcagcgtgtggatggagagggacgtgtacctccaaggacccatctgggccaagatcccagagacaggggcgcactttcacccctctccggccatgggcggattcggactcaaacacccaccgcccatgatgctcatcaagaacacgcctgtgcccggaaatatcaccagcttctcggacgtgcccgtcagcagcttcatcacccagtacagcaccgggcaggtcaccgtggagatggagtgggagctcaagaaggaaaactccaagaggtggaacccagagatccagtacacaaacaactacaacgacccccagtttgtggactttgccccggacagcaccggggaatacagaaccaccagacctatcggaacccgataccttacccgacccctttaa

SEQ ID NO: 103 - protein, 110 aa, Artificial Sequence
  synthetic sequence
MSSIRIKPVVLCCLVITISDPSTGSIEESLSTGQTRSRESTTSRTTSSLRRETTPTSSTTTRTPSFRRSSPTTHPSGETSERQSFRPRKGFSNLLAWLKRVLRRPLPESG

SEQ ID NO: 104 - DNA, 333 bp, Artificial Sequence
  synthetic sequence
atgagcagcataaggatcaagcccgtggtcttgtgctgcctggttataactatctcggacccttcaacgggctcgatcgaggagagcctgtcaacagggcagacgaggtcgcgcgagagcacgacatctcgtacaacgagcagcttgaggcgggagacaacccctacctcaagtacaaccacgcggacgccgagtttcaggagaagctcgccgacgacacatccttcgggggaaacctcggaaaggcagtctttcaggccaagaaaagggttctcgaaccttttggcctggttgaagagggtgctaagacggcccctaccggaaagcggatag

SEQ ID NO: 105 - protein, 724 aa, Artificial Sequence
  synthetic sequence
MSFVDHPPDWLEEVGEGLREFLGLEAGPPKPKPNQQHQDQARGLVLPGYNYLGPGNGLDRGEPVNEADAVALEHDISYNEQLDAGDNPYLKYNHADAEFQEKLADDTSFGGNLGKAVFQAKKRVLEPFGLVEEGAKTAPTGKRIDDHFPKRKKARTEEDSKPSTSSDAEAGPSGSQQLQIPAQPASSLGADTMSAGGGGPLGDNNQGADGVGNASGDWHCDSTWMGDRVVTKSTRTWVLPSYNNHQYREIKSGSVDGSNANAYFGYSTPWGYFDFNRFHSHWSPRDWQRLINNYWGFRPRSLRVKIFNIQVKEVTVQDSTTTIANNLTSTVQVFTDDDYQLPYVVGNGTEGCLPAFPPQVFTLPQYGYATLNRDNTENPTERSSFFCLEYFPSKMLRTGNNFEFTYNFEEVPFHSSFAPSQNLFKLANPLVDQYLYRFVSTNNTGGVQFNKNLAGRYANTYKNWFPGPMGRTQGWNLGSGVNRASVSAFATTNRMELEGASYQVPPQPNGMTNNLQGSNTYALENTMIFNSQPANPGTTATYLEGNMLITSESETQPVNRVAYNVGGQMATNNQSSTTAPATGTYNLQEIVPGSVWMERDVYLQGPIWAKIPETGAHFHPSPAMGGFGLKHPPPMMLIKNTPVPGNITSFSDVPVSSFITQYSTGQVTVEMEWELKKENSKRWNPEIQYTNNYNDPQFVDFAPDSTGEYRTTRPIGTRYLTRPL

SEQ ID NO: 106 - DNA, 2175 bp, Artificial Sequence
  synthetic sequence
atgtcttttgttgatcaccctccagattggttggaagaagttggtgaaggtcttcgcgagtttttgggccttgaagcgggcccaccgaaaccaaaacccaatcagcagcatcaagatcaagcccgtggtcttgtgctgcctggttataactatctcggacccggaaacgggctcgatcgaggagagcctgtcaacgaagcagacgcggtcgcgcttgagcacgacatctcgtacaacgagcagcttgatgcgggagacaacccctacctcaagtacaaccacgcggacgccgagtttcaggagaagctcgccgacgacacatccttcgggggaaacctcggaaaggcagtctttcaggccaagaaaagggttctcgaaccttttggcctggttgaagagggtgctaagacggcccctaccggaaagcggatagacgaccactttccaaaaagaaagaaggctcggaccgaagaggactccaagccttccacctcgtcagacgccgaagctggacccagcggatcccagcagctgcaaatcccagcccaaccagcctcaagtttgggagctgatacaatgtctgcgggaggtggcggcccattgggcgacaataaccaaggtgccgatggagtgggcaatgcctcgggagattggcattgcgattccacgtggatgggggacagagtcgtcaccaagtccacccgaacctgggtgctgcccagctacaacaaccaccagtaccgagagatcaaaagcggctccgtcgacggaagcaacgccaacgcctactttggatacagcaccccctgggggtactttgactttaaccgcttccacagccactggagcccccgagactggcaaagactcatcaacaactactggggcttcagaccccggtccctcagagtcaaaatcttcaacattcaagtcaaagaggtcacggtgcaggactccaccaccaccatcgccaacaacctcacctccaccgtccaagtgtttacggacgacgactaccagctgccctacgtcgtcggcaacgggaccgagggatgcctgccggccttccctccgcaggtctttacgctgccgcagtacggttacgcgacgctgaaccgcgacaacacagaaaatcccaccgagaggagcagcttcttctgcctagagtactttcccagcaagatgctgagaacgggcaacaactttgagtttacctacaactttgaggaggtgcccttccactccagcttcgctcccagtcagaacctgttcaagctggccaacccgctggtggaccagtacttgtaccgcttcgtgagcacaaataacactggcggagtccagttcaacaagaacctggccgggagatacgccaacacctacaaaaactggttcccggggcccatgggccgaacccagggctggaacctgggctccggggtcaaccgcgccagtgtcagcgccttcgccacgaccaataggatggagctcgagggcgcgagttaccaggtgcccccgcagccgaacggcatgaccaacaacctccagggcagcaacacctatgccctggagaacactatgatcttcaacagccagccggcgaacccgggcaccaccgccacgtacctcgagggcaacatgctcatcaccagcgagagcgagacacagccggtgaaccgcgtggcgtacaacgtcggcgggcagatggccaccaacaaccagagctccaccactgcccccgcgaccggcacgtacaacctccaggaaatcgtgcccggcagcgtgtggatggagagggacgtgtacctccaaggacccatctgggccaagatcccagagacaggggcgcactttcacccctctccggccatgggcggattcggactcaaacacccaccgcccatgatgctcatcaagaacacgcctgtgcccggaaatatcaccagcttctcggacgtgcccgtcagcagcttcatcacccagtacagcaccgggcaggtcaccgtggagatggagtgggagctcaagaaggaaaactccaagaggtggaacccagagatccagtacacaaacaactacaacgacccccagtttgtggactttgccccggacagcaccggggaatacagaaccaccagacctatcggaacccgataccttacccgacccctttaa

SEQ ID NO: 107 - protein, 61 aa, Artificial Sequence; identical to SEQ ID NO: 35
  synthetic sequence

SEQ ID NO: 108 - DNA, 186 bp, Artificial Sequence; identical to SEQ ID NO: 36
  synthetic sequence

SEQ ID NO: 109 - protein, 724 aa, Artificial Sequence
  synthetic sequence
MSFVDHPPDWLEEVGEGLREFLGLEAGPPKPKPNQQHQDNARGLVLPGYKYLGPGNGLDRGEPVNAADEVAREHDISYNEQLEAGDNPYLKYNHADAEFQEKLADDTSFGGNLGKAVFQAKKRVLEPFGLVEEGAKTAPTGKRIDDHFPKRKKARTEEDSKPSTSSDAEAGPSGSQQLQIPAQPASSLGADTMSAGGGGPLGDNNQGADGVGNASGDWHCDSTWMGDRVVTKSTRTWVLPSYNNHQYREIKSGSVDGSNANAYFGYSTPWGYFDFNRFHSHWSPRDWQRLINNYWGFRPRSLRVKIFNIQVKEVTVQDSTTTIANNLTSTVQVFTDDDYQLPYVVGNGTEGCLPAFPPQVFTLPQYGYATLNRDNTENPTERSSFFCLEYFPSKMLRTGNNFEFTYNFEEVPFHSSFAPSQNLFKLANPLVDQYLYRFVSTNNTGGVQFNKNLAGRYANTYKNWFPGPMGRTQGWNLGSGVNRASVSAFATTNRMELEGASYQVPPQPNGMTNNLQGSNTYALENTMIFNSQPANPGTTATYLEGNMLITSESETQPVNRVAYNVGGQMATNNQSSTTAPATGTYNLQEIVPGSVWMERDVYLQGPIWAKIPETGAHFHPSPAMGGFGLKHPPPMMLIKNTPVPGNITSFSDVPVSSFITQYSTGQVTVEMEWELKKENSKRWNPEIQYTNNYNDPQFVDFAPDSTGEYRTTRPIGTRYLTRPL

SEQ ID NO: 110 - DNA, 2175 bp, Artificial Sequence
  synthetic sequence
atgtcttttgttgatcaccctccagattggttggaagaagttggtgaaggtcttcgcgagtttttgggccttgaagcgggcccaccgaaaccaaaacccaatcagcagcatcaagataatgcccgtggtcttgtgctgcctggttataagtatctcggacccggaaacgggctcgatcgaggagagcctgtcaacgctgcagacgaggtcgcgcgagagcacgacatctcgtacaacgagcagcttgaggcgggagacaacccctacctcaagtacaaccacgcggacgccgagtttcaggagaagctcgccgacgacacatccttcgggggaaacctcggaaaggcagtctttcaggccaagaaaagggttctcgaaccttttggcctggttgaagagggtgctaagacggcccctaccggaaagcggatagacgaccactttccaaaaagaaagaaggctcggaccgaagaggactccaagccttccacctcgtcagacgccgaagctggacccagcggatcccagcagctgcaaatcccagcccaaccagcctcaagtttgggagctgatacaatgtctgcgggaggtggcggcccattgggcgacaataaccaaggtgccgatggagtgggcaatgcctcgggagattggcattgcgattccacgtggatgggggacagagtcgtcaccaagtccacccgaacctgggtgctgcccagctacaacaaccaccagtaccgagagatcaaaagcggctccgtcgacggaagcaacgccaacgcctactttggatacagcaccccctgggggtactttgactttaaccgcttccacagccactggagcccccgagactggcaaagactcatcaacaactactggggcttcagaccccggtccctcagagtcaaaatcttcaacattcaagtcaaagaggtcacggtgcaggactccaccaccaccatcgccaacaacctcacctccaccgtccaagtgtttacggacgacgactaccagctgccctacgtcgtcggcaacgggaccgagggatgcctgccggccttccctccgcaggtctttacgctgccgcagtacggttacgcgacgctgaaccgcgacaacacagaaaatcccaccgagaggagcagcttcttctgcctagagtactttcccagcaagatgctgagaacgggcaacaactttgagtttacctacaactttgaggaggtgcccttccactccagcttcgctcccagtcagaacctgttcaagctggccaacccgctggtggaccagtacttgtaccgcttcgtgagcacaaataacactggcggagtccagttcaacaagaacctggccgggagatacgccaacacctacaaaaactggttcccggggcccatgggccgaacccagggctggaacctgggctccggggtcaaccgcgccagtgtcagcgccttcgccacgaccaataggatggagctcgagggcgcgagttaccaggtgcccccgcagccgaacggcatgaccaacaacctccagggcagcaacacctatgccctggagaacactatgatcttcaacagccagccggcgaacccgggcaccaccgccacgtacctcgagggcaacatgctcatcaccagcgagagcgagacacagccggtgaaccgcgtggcgtacaacgtcggcgggcagatggccaccaacaaccagagctccaccactgcccccgcgaccggcacgtacaacctccaggaaatcgtgcccggcagcgtgtggatggagagggacgtgtacctccaaggacccatctgggccaagatcccagagacaggggcgcactttcacccctctccggccatgggcggattcggactcaaacacccaccgcccatgatgctcatcaagaacacgcctgtgcccggaaatatcaccagcttctcggacgtgcccgtcagcagcttcatcacccagtacagcaccgggcaggtcaccgtggagatggagtgggagctcaagaaggaaaactccaagaggtggaacccagagatccagtacacaaacaactacaacgacccccagtttgtggactttgccccggacagcaccggggaatacagaaccaccagacctatcggaacccgataccttacccgacccctttaa

SEQ ID NO: 111 - protein, 104 aa, Artificial Sequence
  synthetic sequence
MPVVLCCLVISISDPETGSIEESLSTLQTRSRESTTSRTTSSLRRETTPTSSTTTRTPSFRRSSPTTHPSGETSERQSFRPRKGFSNLLAWLKRVLRRPLPESG

SEQ ID NO: 112 - DNA, 315 bp, Artificial Sequence
  synthetic sequence
atgcccgtggtcttgtgctgcctggttataagtatctcggacccggaaacgggctcgatcgaggagagcctgtcaacgctgcagacgaggtcgcgcgagagcacgacatctcgtacaacgagcagcttgaggcgggagacaacccctacctcaagtacaaccacgcggacgccgagtttcaggagaagctcgccgacgacacatccttcgggggaaacctcggaaaggcagtctttcaggccaagaaaagggttctcgaaccttttggcctggttgaagagggtgctaagacggcccctaccggaaagcggatag

SEQ ID NO: 113 - protein, 724 aa, Artificial Sequence
  synthetic sequence
MSFVDHPPDWLEEVGEGLREFLGLEAGPPKPKPNQQHQDQARGLVLPGYNYLGPGNGLDRGEPVNRADEVAREHDISYYEQLEAGDNPYLKYNHADAEFQEKLADDTSFGGNLGKAVFQAKKRVLEPFGLVEEGAKTAPTGKRIDDHFPKRKKARTEEDSKPSTSSDAEAGPSGSQQLQIPAQPASSLGADTMSAGGGGPLGDNNQGADGVGNASGDWHCDSTWMGDRVVTKSTRTWVLPSYNNHQYREIKSGSVDGSNANAYFGYSTPWGYFDFNRFHSHWSPRDWQRLINNYWGFRPRSLRVKIFNIQVKEVTVQDSTTTIANNLTSTVQVFTDDDYQLPYVVGNGTEGCLPAFPPQVFTLPQYGYATLNRDNTENPTERSSFFCLEYFPSKMLRTGNNFEFTYNFEEVPFHSSFAPSQNLFKLANPLVDQYLYRFVSTNNTGGVQFNKNLAGRYANTYKNWFPGPMGRTQGWNLGSGVNRASVSAFATTNRMELEGASYQVPPQPNGMTNNLQGSNTYALENTMIFNSQPANPGTTATYLEGNMLITSESETQPVNRVAYNVGGQMATNNQSSTTAPATGTYNLQEIVPGSVWMERDVYLQGPIWAKIPETGAHFHPSPAMGGFGLKHPPPMMLIKNTPVPGNITSFSDVPVSSFITQYSTGQVTVEMEWELKKENSKRWNPEIQYTNNYNDPQFVDFAPDSTGEYRTTRPIGTRYLTRPL

SEQ ID NO: 114 - DNA, 2175 bp, Artificial Sequence
  synthetic sequence
atgtcttttgttgatcaccctccagattggttggaagaagttggtgaaggtcttcgcgagtttttgggccttgaagcgggcccaccgaaaccaaaacccaatcagcagcatcaagatcaagcccgtggtcttgtgctgcctggttataactatctcggacccggaaacgggctcgatcgaggagagcctgtcaacagggcagacgaggtcgcgcgagagcacgacatctcgtactatgagcagcttgaggcgggagacaacccctacctcaagtacaaccacgcggacgccgagtttcaggagaagctcgccgacgacacatccttcgggggaaacctcggaaaggcagtctttcaggccaagaaaagggttctcgaaccttttggcctggttgaagagggtgctaagacggcccctaccggaaagcggatagacgaccactttccaaaaagaaagaaggctcggaccgaagaggactccaagccttccacctcgtcagacgccgaagctggacccagcggatcccagcagctgcaaatcccagcccaaccagcctcaagtttgggagctgatacaatgtctgcgggaggtggcggcccattgggcgacaataaccaaggtgccgatggagtgggcaatgcctcgggagattggcattgcgattccacgtggatgggggacagagtcgtcaccaagtccacccgaacctgggtgctgcccagctacaacaaccaccagtaccgagagatcaaaagcggctccgtcgacggaagcaacgccaacgcctactttggatacagcaccccctgggggtactttgactttaaccgcttccacagccactggagcccccgagactggcaaagactcatcaacaactactggggcttcagaccccggtccctcagagtcaaaatcttcaacattcaagtcaaagaggtcacggtgcaggactccaccaccaccatcgccaacaacctcacctccaccgtccaagtgtttacggacgacgactaccagctgccctacgtcgtcggcaacgggaccgagggatgcctgccggccttccctccgcaggtctttacgctgccgcagtacggttacgcgacgctgaaccgcgacaacacagaaaatcccaccgagaggagcagcttcttctgcctagagtactttcccagcaagatgctgagaacgggcaacaactttgagtttacctacaactttgaggaggtgcccttccactccagcttcgctcccagtcagaacctgttcaagctggccaacccgctggtggaccagtacttgtaccgcttcgtgagcacaaataacactggcggagtccagttcaacaagaacctggccgggagatacgccaacacctacaaaaactggttcccggggcccatgggccgaacccagggctggaacctgggctccggggtcaaccgcgccagtgtcagcgccttcgccacgaccaataggatggagctcgagggcgcgagttaccaggtgcccccgcagccgaacggcatgaccaacaacctccagggcagcaacacctatgccctggagaacactatgatcttcaacagccagccggcgaacccgggcaccaccgccacgtacctcgagggcaacatgctcatcaccagcgagagcgagacacagccggtgaaccgcgtggcgtacaacgtcggcgggcagatggccaccaacaaccagagctccaccactgcccccgcgaccggcacgtacaacctccaggaaatcgtgcccggcagcgtgtggatggagagggacgtgtacctccaaggacccatctgggccaagatcccagagacaggggcgcactttcacccctctccggccatgggcggattcggactcaaacacccaccgcccatgatgctcatcaagaacacgcctgtgcccggaaatatcaccagcttctcggacgtgcccgtcagcagcttcatcacccagtacagcaccgggcaggtcaccgtggagatggagtgggagctcaagaaggaaaactccaagaggtggaacccagagatccagtacacaaacaactacaacgacccccagtttgtggactttgccccggacagcaccggggaatacagaaccaccagacctatcggaacccgataccttacccgacccctttaa

SEQ ID NO: 115 - protein, 65 aa, Artificial Sequence
  synthetic sequence
MSSLRRETTPTSSTTTRTPSFRRSSPTTHPSGETSERQSFRPRKGFSNLLAWLKRVLRRPLPESG

SEQ ID NO: 116 - DNA, 198 bp, Artificial Sequence
  synthetic sequence
atgagcagcttgaggcgggagacaacccctacctcaagtacaaccacgcggacgccgagtttcaggagaagctcgccgacgacacatccttcgggggaaacctcggaaaggcagtctttcaggccaagaaaagggttctcgaaccttttggcctggttgaagagggtgctaagacggcccctaccggaaagcggatag

SEQ ID NO: 117 - protein, 724 aa, Artificial Sequence
  synthetic sequence
MSFVDHPPDWLEEVGEGLREFLGLEAGPPKPKPNQQHQDQARGLVLPGYNYLGPGNGLDAGEPVNRADEVAREHDISYNEQLEAGDNPYLKYNHADAEFQEKLADDTSFGGNLGKAVFQAKKRVLEPFGLVEEGAKTAPTGKRIDDHFPKRKKARTEEDSKPSTSSDAEAGPSGSQQLQIPAQPASSLGADTMSAGGGGPLGDNNQGADGVGNASGDWHCDSTWMGDRVVTKSTRTWVLPSYNNHQYREIKSGSVDGSNANAYFGYSTPWGYFDFNRFHSHWSPRDWQRLINNYWGFRPRSLRVKIFNIQVKEVTVQDSTTTIANNLTSTVQVFTDDDYQLPYVVGNGTEGCLPAFPPQVFTLPQYGYATLNRDNTENPTERSSFFCLEYFPSKMLRTGNNFEFTYNFEEVPFHSSFAPSQNLFKLANPLVDQYLYRFVSTNNTGGVQFNKNLAGRYANTYKNWFPGPMGRTQGWNLGSGVNRASVSAFATTNRMELEGASYQVPPQPNGMTNNLQGSNTYALENTMIFNSQPANPGTTATYLEGNMLITSESETQPVNRVAYNVGGQMATNNQSSTTAPATGTYNLQEIVPGSVWMERDVYLQGPIWAKIPETGAHFHPSPAMGGFGLKHPPPMMLIKNTPVPGNITSFSDVPVSSFITQYSTGQVTVEMEWELKKENSKRWNPEIQYTNNYNDPQFVDFAPDSTGEYRTTRPIGTRYLTRPL

SEQ ID NO: 118 - DNA, 2175 bp, Artificial Sequence
  synthetic sequence
atgtcttttgttgatcaccctccagattggttggaagaagttggtgaaggtcttcgcgagtttttgggccttgaagcgggcccaccgaaaccaaaacccaatcagcagcatcaagatcaagcccgtggtcttgtgctgcctggttataactatctcggacccggaaacgggctcgatgccggagagcctgtcaacagggcagacgaggtcgcgcgagagcacgacatctcgtacaacgagcagcttgaggcgggagacaacccctacctcaagtacaaccacgcggacgccgagtttcaggagaagctcgccgacgacacatccttcgggggaaacctcggaaaggcagtctttcaggccaagaaaagggttctcgaaccttttggcctggttgaagagggtgctaagacggcccctaccggaaagcggatagacgaccactttccaaaaagaaagaaggctcggaccgaagaggactccaagccttccacctcgtcagacgccgaagctggacccagcggatcccagcagctgcaaatcccagcccaaccagcctcaagtttgggagctgatacaatgtctgcgggaggtggcggcccattgggcgacaataaccaaggtgccgatggagtgggcaatgcctcgggagattggcattgcgattccacgtggatgggggacagagtcgtcaccaagtccacccgaacctgggtgctgcccagctacaacaaccaccagtaccgagagatcaaaagcggctccgtcgacggaagcaacgccaacgcctactttggatacagcaccccctgggggtactttgactttaaccgcttccacagccactggagcccccgagactggcaaagactcatcaacaactactggggcttcagaccccggtccctcagagtcaaaatcttcaacattcaagtcaaagaggtcacggtgcaggactccaccaccaccatcgccaacaacctcacctccaccgtccaagtgtttacggacgacgactaccagctgccctacgtcgtcggcaacgggaccgagggatgcctgccggccttccctccgcaggtctttacgctgccgcagtacggttacgcgacgctgaaccgcgacaacacagaaaatcccaccgagaggagcagcttcttctgcctagagtactttcccagcaagatgctgagaacgggcaacaactttgagtttacctacaactttgaggaggtgcccttccactccagcttcgctcccagtcagaacctgttcaagctggccaacccgctggtggaccagtacttgtaccgcttcgtgagcacaaataacactggcggagtccagttcaacaagaacctggccgggagatacgccaacacctacaaaaactggttcccggggcccatgggccgaacccagggctggaacctgggctccggggtcaaccgcgccagtgtcagcgccttcgccacgaccaataggatggagctcgagggcgcgagttaccaggtgcccccgcagccgaacggcatgaccaacaacctccagggcagcaacacctatgccctggagaacactatgatcttcaacagccagccggcgaacccgggcaccaccgccacgtacctcgagggcaacatgctcatcaccagcgagagcgagacacagccggtgaaccgcgtggcgtacaacgtcggcgggcagatggccaccaacaaccagagctccaccactgcccccgcgaccggcacgtacaacctccaggaaatcgtgcccggcagcgtgtggatggagagggacgtgtacctccaaggacccatctgggccaagatcccagagacaggggcgcactttcacccctctccggccatgggcggattcggactcaaacacccaccgcccatgatgctcatcaagaacacgcctgtgcccggaaatatcaccagcttctcggacgtgcccgtcagcagcttcatcacccagtacagcaccgggcaggtcaccgtggagatggagtgggagctcaagaaggaaaactccaagaggtggaacccagagatccagtacacaaacaactacaacgacccccagtttgtggactttgccccggacagcaccggggaatacagaaccaccagacctatcggaacccgataccttacccgacccctttaa

SEQ ID NO: 119 - protein, 85 aa, Artificial Sequence
  synthetic sequence
MPESLSTGQTRSRESTTSRTTSSLRRETTPTSSTTTRTPSFRRSSPTTHPSGETSERQSFRPRKGFSNLLAWLKRVLRRPLPESG

SEQ ID NO: 120 - DNA, 258 bp, Artificial Sequence
  synthetic sequence
atgccggagagcctgtcaacagggcagacgaggtcgcgcgagagcacgacatctcgtacaacgagcagcttgaggcgggagacaacccctacctcaagtacaaccacgcggacgccgagtttcaggagaagctcgccgacgacacatccttcgggggaaacctcggaaaggcagtctttcaggccaagaaaagggttctcgaaccttttggcctggttgaagagggtgctaagacggcccctaccggaaagcggatag

SEQ ID NO: 121 - protein, 724 aa, Artificial Sequence
  synthetic sequence
MSFVDHPPDWLEEVGEGLREFLGLEAGPPKPKPNQQHQDQARGLVLPGYVYLGPGNGLDRGEPVNRADEVAREHDISYNEQLEAGDNPYLKYNHADAEFQEKLADDTSFGGNLGKAVFQAKKRVLEPFGLVEEGAKTAPTGKRIDDHFPKRKKARTEEDSKPSTSSDAEAGPSGSQQLQIPAQPASSLGADTMSAGGGGPLGDNNQGADGVGNASGDWHCDSTWMGDRVVTKSTRTWVLPSYNNHQYREIKSGSVDGSNANAYFGYSTPWGYFDFNRFHSHWSPRDWQRLINNYWGFRPRSLRVKIFNIQVKEVTVQDSTTTIANNLTSTVQVFTDDDYQLPYVVGNGTEGCLPAFPPQVFTLPQYGYATLNRDNTENPTERSSFFCLEYFPSKMLRTGNNFEFTYNFEEVPFHSSFAPSQNLFKLANPLVDQYLYRFVSTNNTGGVQFNKNLAGRYANTYKNWFPGPMGRTQGWNLGSGVNRASVSAFATTNRMELEGASYQVPPQPNGMTNNLQGSNTYALENTMIFNSQPANPGTTATYLEGNMLITSESETQPVNRVAYNVGGQMATNNQSSTTAPATGTYNLQEIVPGSVWMERDVYLQGPIWAKIPETGAHFHPSPAMGGFGLKHPPPMMLIKNTPVPGNITSFSDVPVSSFITQYSTGQVTVEMEWELKKENSKRWNPEIQYTNNYNDPQFVDFAPDSTGEYRTTRPIGTRYLTRPL

SEQ ID NO: 122 - DNA, 2175 bp, Artificial Sequence
  synthetic sequence
atgtcttttgttgatcaccctccagattggttggaagaagttggtgaaggtcttcgcgagtttttgggccttgaagcgggcccaccgaaaccaaaacccaatcagcagcatcaagatcaagcccgtggtcttgtgctgcctggttatgtttatctcggacccggaaacgggctcgatcgaggagagcctgtcaacagggcagacgaggtcgcgcgagagcacgacatctcgtacaacgagcagcttgaggcgggagacaacccctacctcaagtacaaccacgcggacgccgagtttcaggagaagctcgccgacgacacatccttcgggggaaacctcggaaaggcagtctttcaggccaagaaaagggttctcgaaccttttggcctggttgaagagggtgctaagacggcccctaccggaaagcggatagacgaccactttccaaaaagaaagaaggctcggaccgaagaggactccaagccttccacctcgtcagacgccgaagctggacccagcggatcccagcagctgcaaatcccagcccaaccagcctcaagtttgggagctgatacaatgtctgcgggaggtggcggcccattgggcgacaataaccaaggtgccgatggagtgggcaatgcctcgggagattggcattgcgattccacgtggatgggggacagagtcgtcaccaagtccacccgaacctgggtgctgcccagctacaacaaccaccagtaccgagagatcaaaagcggctccgtcgacggaagcaacgccaacgcctactttggatacagcaccccctgggggtactttgactttaaccgcttccacagccactggagcccccgagactggcaaagactcatcaacaactactggggcttcagaccccggtccctcagagtcaaaatcttcaacattcaagtcaaagaggtcacggtgcaggactccaccaccaccatcgccaacaacctcacctccaccgtccaagtgtttacggacgacgactaccagctgccctacgtcgtcggcaacgggaccgagggatgcctgccggccttccctccgcaggtctttacgctgccgcagtacggttacgcgacgctgaaccgcgacaacacagaaaatcccaccgagaggagcagcttcttctgcctagagtactttcccagcaagatgctgagaacgggcaacaactttgagtttacctacaactttgaggaggtgcccttccactccagcttcgctcccagtcagaacctgttcaagctggccaacccgctggtggaccagtacttgtaccgcttcgtgagcacaaataacactggcggagtccagttcaacaagaacctggccgggagatacgccaacacctacaaaaactggttcccggggcccatgggccgaacccagggctggaacctgggctccggggtcaaccgcgccagtgtcagcgccttcgccacgaccaataggatggagctcgagggcgcgagttaccaggtgcccccgcagccgaacggcatgaccaacaacctccagggcagcaacacctatgccctggagaacactatgatcttcaacagccagccggcgaacccgggcaccaccgccacgtacctcgagggcaacatgctcatcaccagcgagagcgagacacagccggtgaaccgcgtggcgtacaacgtcggcgggcagatggccaccaacaaccagagctccaccactgcccccgcgaccggcacgtacaacctccaggaaatcgtgcccggcagcgtgtggatggagagggacgtgtacctccaaggacccatctgggccaagatcccagagacaggggcgcactttcacccctctccggccatgggcggattcggactcaaacacccaccgcccatgatgctcatcaagaacacgcctgtgcccggaaatatcaccagcttctcggacgtgcccgtcagcagcttcatcacccagtacagcaccgggcaggtcaccgtggagatggagtgggagctcaagaaggaaaactccaagaggtggaacccagagatccagtacacaaacaactacaacgacccccagtttgtggactttgccccggacagcaccggggaatacagaaccaccagacctatcggaacccgataccttacccgacccctttaa

SEQ ID NO: 123 - protein, 95 aa, Artificial Sequence
  synthetic sequence
MFISDPETGSIEESLSTGQTRSRESTTSRTTSSLRRETTPTSSTTTRTPSFRRSSPTTHPSGETSERQSFRPRKGFSNLLAWLKRVLRRPLPESG

SEQ ID NO: 124 - DNA, 288 bp, Artificial Sequence
  synthetic sequence
atgtttatctcggacccggaaacgggctcgatcgaggagagcctgtcaacagggcagacgaggtcgcgcgagagcacgacatctcgtacaacgagcagcttgaggcgggagacaacccctacctcaagtacaaccacgcggacgccgagtttcaggagaagctcgccgacgacacatccttcgggggaaacctcggaaaggcagtctttcaggccaagaaaagggttctcgaaccttttggcctggttgaagagggtgctaagacggcccctaccggaaagcggatag

SEQ ID NO: 125 - protein, 724 aa, Artificial Sequence
  synthetic sequence
MSFVDHPPDWLETLGEGLREFLKLEAGPPKPKPNERHQDQARGLVLPGYNYLGPGNGLDRGEPVNRADEVAREHDISYNEQLEAGDNPYLKYNHADAEFQEKLADDTSFGGNLGKAVFQAKKRVLEPFGLVEEGAKTAPTGKRIDDHFPKRKKARTEEDSKPSTSSDAEAGPSGSQQLQIPAQPASSLGADTMSAGGGGPLGDNNQGADGVGNASGDWHCDSTWMGDRVVTKSTRTWVLPSYNNHQYREIKSGSVDGSNANAYFGYSTPWGYFDFNRFHSHWSPRDWQRLINNYWGFRPRSLRVKIFNIQVKEVTVQDSTTTIANNLTSTVQVFTDDDYQLPYVVGNGTEGCLPAFPPQVFTLPQYGYATLNRDNTENPTERSSFFCLEYFPSKMLRTGNNFEFTYNFEEVPFHSSFAPSQNLFKLANPLVDQYLYRFVSTNNTGGVQFNKNLAGRYANTYKNWFPGPMGRTQGWNLGSGVNRASVSAFATTNRMELEGASYQVPPQPNGMTNNLQGSNTYALENTMIFNSQPANPGTTATYLEGNMLITSESETQPVNRVAYNVGGQMATNNQSSTTAPATGTYNLQEIVPGSVWMERDVYLQGPIWAKIPETGAHFHPSPAMGGFGLKHPPPMMLIKNTPVPGNITSFSDVPVSSFITQYSTGQVTVEMEWELKKENSKRWNPEIQYTNNYNDPQFVDFAPDSTGEYRTTRPIGTRYLTRPL

SEQ ID NO: 126 - DNA, 2175 bp, Artificial Sequence
  synthetic sequence
atgtcttttgttgatcaccctccagattggttggaaacccttggtgaaggccttcgcgagtttttgaaacttgaagcgggcccaccgaaaccaaaacccaatgaacggcatcaagatcaagcccgtggtcttgtgctgcctggttataactatctcggacccggaaacgggctcgatcgaggagagcctgtcaacagggcagacgaggtcgcgcgagagcacgacatctcgtacaacgagcagcttgaggcgggagacaacccctacctcaagtacaaccacgcggacgccgagtttcaggagaagctcgccgacgacacatccttcgggggaaacctcggaaaggcagtctttcaggccaagaaaagggttctcgaaccttttggcctggttgaagagggtgctaagacggcccctaccggaaagcggatagacgaccactttccaaaaagaaagaaggctcggaccgaagaggactccaagccttccacctcgtcagacgccgaagctggacccagcggatcccagcagctgcaaatcccagcccaaccagcctcaagtttgggagctgatacaatgtctgcgggaggtggcggcccattgggcgacaataaccaaggtgccgatggagtgggcaatgcctcgggagattggcattgcgattccacgtggatgggggacagagtcgtcaccaagtccacccgaacctgggtgctgcccagctacaacaaccaccagtaccgagagatcaaaagcggctccgtcgacggaagcaacgccaacgcctactttggatacagcaccccctgggggtactttgactttaaccgcttccacagccactggagcccccgagactggcaaagactcatcaacaactactggggcttcagaccccggtccctcagagtcaaaatcttcaacattcaagtcaaagaggtcacggtgcaggactccaccaccaccatcgccaacaacctcacctccaccgtccaagtgtttacggacgacgactaccagctgccctacgtcgtcggcaacgggaccgagggatgcctgccggccttccctccgcaggtctttacgctgccgcagtacggttacgcgacgctgaaccgcgacaacacagaaaatcccaccgagaggagcagcttcttctgcctagagtactttcccagcaagatgctgagaacgggcaacaactttgagtttacctacaactttgaggaggtgcccttccactccagcttcgctcccagtcagaacctgttcaagctggccaacccgctggtggaccagtacttgtaccgcttcgtgagcacaaataacactggcggagtccagttcaacaagaacctggccgggagatacgccaacacctacaaaaactggttcccggggcccatgggccgaacccagggctggaacctgggctccggggtcaaccgcgccagtgtcagcgccttcgccacgaccaataggatggagctcgagggcgcgagttaccaggtgcccccgcagccgaacggcatgaccaacaacctccagggcagcaacacctatgccctggagaacactatgatcttcaacagccagccggcgaacccgggcaccaccgccacgtacctcgagggcaacatgctcatcaccagcgagagcgagacacagccggtgaaccgcgtggcgtacaacgtcggcgggcagatggccaccaacaaccagagctccaccactgcccccgcgaccggcacgtacaacctccaggaaatcgtgcccggcagcgtgtggatggagagggacgtgtacctccaaggacccatctgggccaagatcccagagacaggggcgcactttcacccctctccggccatgggcggattcggactcaaacacccaccgcccatgatgctcatcaagaacacgcctgtgcccggaaatatcaccagcttctcggacgtgcccgtcagcagcttcatcacccagtacagcaccgggcaggtcaccgtggagatggagtgggagctcaagaaggaaaactccaagaggtggaacccagagatccagtacacaaacaactacaacgacccccagtttgtggactttgccccggacagcaccggggaatacagaaccaccagacctatcggaacccgataccttacccgacccctttaa

SEQ ID NO: 127 - protein, 110 aa, Artificial Sequence
  synthetic sequence
MNGIKIKPVVLCCLVITISDPETGSIEESLSTGQTRSRESTTSRTTSSLRRETTPTSSTTTRTPSFRRSSPTTHPSGETSERQSFRPRKGFSNLLAWLKRVLRRPLPESG

SEQ ID NO: 128 - DNA, 333 bp, Artificial Sequence
  synthetic sequence
atgaacggcatcaagatcaagcccgtggtcttgtgctgcctggttataactatctcggacccggaaacgggctcgatcgaggagagcctgtcaacagggcagacgaggtcgcgcgagagcacgacatctcgtacaacgagcagcttgaggcgggagacaacccctacctcaagtacaaccacgcggacgccgagtttcaggagaagctcgccgacgacacatccttcgggggaaacctcggaaaggcagtctttcaggccaagaaaagggttctcgaaccttttggcctggttgaagagggtgctaagacggcccctaccggaaagcggatag

SEQ ID NO: 129 - protein, 724 aa, Artificial Sequence
  synthetic sequence
MSFVDHPPDWLEEVGEGLREFLGLEAGPPKPKPNQQHQDQARGLVLPGYNYLGPGNGLDRGEPVNEADEAAREHDISYNRQLDAGDNPYLKYNHADAEFQEKLADDTSFGGNLGKAVFQAKKRVLEPFGLVEEGAKTAPTGKRIDDHFPKRKKARTEEDSKPSTSSDAEAGPSGSQQLQIPAQPASSLGADTMSAGGGGPLGDNNQGADGVGNASGDWHCDSTWMGDRVVTKSTRTWVLPSYNNHQYREIKSGSVDGSNANAYFGYSTPWGYFDFNRFHSHWSPRDWQRLINNYWGFRPRSLRVKIFNIQVKEVTVQDSTTTIANNLTSTVQVFTDDDYQLPYVVGNGTEGCLPAFPPQVFTLPQYGYATLNRDNTENPTERSSFFCLEYFPSKMLRTGNNFEFTYNFEEVPFHSSFAPSQNLFKLANPLVDQYLYRFVSTNNTGGVQFNKNLAGRYANTYKNWFPGPMGRTQGWNLGSGVNRASVSAFATTNRMELEGASYQVPPQPNGMTNNLQGSNTYALENTMIFNSQPANPGTTATYLEGNMLITSESETQPVNRVAYNVGGQMATNNQSSTTAPATGTYNLQEIVPGSVWMERDVYLQGPIWAKIPETGAHFHPSPAMGGFGLKHPPPMMLIKNTPVPGNITSFSDVPVSSFITQYSTGQVTVEMEWELKKENSKRWNPEIQYTNNYNDPQFVDFAPDSTGEYRTTRPIGTRYLTRPL

SEQ ID NO: 130 - DNA, 2175 bp, Artificial Sequence
  synthetic sequence
atgtcttttgttgatcaccctccagattggttggaagaagttggtgaaggtcttcgcgagtttttgggccttgaagcgggcccaccgaaaccaaaacccaatcagcagcatcaagatcaagcccgtggtcttgtgctgcctggttataactatctcggacccggaaacgggctcgatcgaggagagcctgtcaacgaggcagacgaggcagcgcgagagcacgacatctcgtacaaccgccagcttgatgcgggagacaacccctacctcaagtacaaccacgcggacgccgagtttcaggagaagctcgccgacgacacatccttcgggggaaacctcggaaaggcagtctttcaggccaagaaaagggttctcgaaccttttggcctggttgaagagggtgctaagacggcccctaccggaaagcggatagacgaccactttccaaaaagaaagaaggctcggaccgaagaggactccaagccttccacctcgtcagacgccgaagctggacccagcggatcccagcagctgcaaatcccagcccaaccagcctcaagtttgggagctgatacaatgtctgcgggaggtggcggcccattgggcgacaataaccaaggtgccgatggagtgggcaatgcctcgggagattggcattgcgattccacgtggatgggggacagagtcgtcaccaagtccacccgaacctgggtgctgcccagctacaacaaccaccagtaccgagagatcaaaagcggctccgtcgacggaagcaacgccaacgcctactttggatacagcaccccctgggggtactttgactttaaccgcttccacagccactggagcccccgagactggcaaagactcatcaacaactactggggcttcagaccccggtccctcagagtcaaaatcttcaacattcaagtcaaagaggtcacggtgcaggactccaccaccaccatcgccaacaacctcacctccaccgtccaagtgtttacggacgacgactaccagctgccctacgtcgtcggcaacgggaccgagggatgcctgccggccttccctccgcaggtctttacgctgccgcagtacggttacgcgacgctgaaccgcgacaacacagaaaatcccaccgagaggagcagcttcttctgcctagagtactttcccagcaagatgctgagaacgggcaacaactttgagtttacctacaactttgaggaggtgcccttccactccagcttcgctcccagtcagaacctgttcaagctggccaacccgctggtggaccagtacttgtaccgcttcgtgagcacaaataacactggcggagtccagttcaacaagaacctggccgggagatacgccaacacctacaaaaactggttcccggggcccatgggccgaacccagggctggaacctgggctccggggtcaaccgcgccagtgtcagcgccttcgccacgaccaataggatggagctcgagggcgcgagttaccaggtgcccccgcagccgaacggcatgaccaacaacctccagggcagcaacacctatgccctggagaacactatgatcttcaacagccagccggcgaacccgggcaccaccgccacgtacctcgagggcaacatgctcatcaccagcgagagcgagacacagccggtgaaccgcgtggcgtacaacgtcggcgggcagatggccaccaacaaccagagctccaccactgcccccgcgaccggcacgtacaacctccaggaaatcgtgcccggcagcgtgtggatggagagggacgtgtacctccaaggacccatctgggccaagatcccagagacaggggcgcactttcacccctctccggccatgggcggattcggactcaaacacccaccgcccatgatgctcatcaagaacacgcctgtgcccggaaatatcaccagcttctcggacgtgcccgtcagcagcttcatcacccagtacagcaccgggcaggtcaccgtggagatggagtgggagctcaagaaggaaaactccaagaggtggaacccagagatccagtacacaaacaactacaacgacccccagtttgtggactttgccccggacagcaccggggaatacagaaccaccagacctatcggaacccgataccttacccgacccctttaa

SEQ ID NO: 131 - protein, 61 aa, Artificial Sequence; identical to SEQ ID NO: 35
  synthetic sequence

SEQ ID NO: 132 - DNA, 186 bp, Artificial Sequence; identical to SEQ ID NO: 36
  synthetic sequence

SEQ ID NO: 133 - protein, 724 aa, Artificial Sequence
  synthetic sequence
MSFVDHPPDWLEEVGEGLREFLGLEAGPPKPKPNQQHQDQARGLVLPGYNYLGPGNGLDRGEPVNYADEVAREHDISYNEQLEAGDNPYLKYNHADAEFQEKLADDTSFGGNLGKAVFQAKKRVLEPFGLVEEGAKTAPTGKRIDDHFPKRKKARTEEDSKPSTSSDAEAGPSGSQQLQIPAQPASSLGADTMSAGGGGPLGDNNQGADGVGNASGDWHCDSTWMGDRVVTKSTRTWVLPSYNNHQYREIKSGSVDGSNANAYFGYSTPWGYFDFNRFHSHWSPRDWQRLINNYWGFRPRSLRVKIFNIQVKEVTVQDSTTTIANNLTSTVQVFTDDDYQLPYVVGNGTEGCLPAFPPQVFTLPQYGYATLNRDNTENPTERSSFFCLEYFPSKMLRTGNNFEFTYNFEEVPFHSSFAPSQNLFKLANPLVDQYLYRFVSTNNTGGVQFNKNLAGRYANTYKNWFPGPMGRTQGWNLGSGVNRASVSAFATTNRMELEGASYQVPPQPNGMTNNLQGSNTYALENTMIFNSQPANPGTTATYLEGNMLITSESETQPVNRVAYNVGGQMATNNQSSTTAPATGTYNLQEIVPGSVWMERDVYLQGPIWAKIPETGAHFHPSPAMGGFGLKHPPPMMLIKNTPVPGNITSFSDVPVSSFITQYSTGQVTVEMEWELKKENSKRWNPEIQYTNNYNDPQFVDFAPDSTGEYRTTRPIGTRYLTRPL

SEQ ID NO: 134 - DNA, 2175 bp, Artificial Sequence
  synthetic sequence
atgtcttttgttgatcaccctccagattggttggaagaagttggtgaaggtcttcgcgagtttttgggccttgaagcgggcccaccgaaaccaaaacccaatcagcagcatcaagatcaagcccgtggtcttgtgctgcctggttataactatctcggacccggaaacgggctcgatcgaggagagcctgtcaactatgcagacgaggtcgcgcgagagcacgacatctcgtacaacgagcagcttgaggcgggagacaacccctacctcaagtacaaccacgcggacgccgagtttcaggagaagctcgccgacgacacatccttcgggggaaacctcggaaaggcagtctttcaggccaagaaaagggttctcgaaccttttggcctggttgaagagggtgctaagacggcccctaccggaaagcggatagacgaccactttccaaaaagaaagaaggctcggaccgaagaggactccaagccttccacctcgtcagacgccgaagctggacccagcggatcccagcagctgcaaatcccagcccaaccagcctcaagtttgggagctgatacaatgtctgcgggaggtggcggcccattgggcgacaataaccaaggtgccgatggagtgggcaatgcctcgggagattggcattgcgattccacgtggatgggggacagagtcgtcaccaagtccacccgaacctgggtgctgcccagctacaacaaccaccagtaccgagagatcaaaagcggctccgtcgacggaagcaacgccaacgcctactttggatacagcaccccctgggggtactttgactttaaccgcttccacagccactggagcccccgagactggcaaagactcatcaacaactactggggcttcagaccccggtccctcagagtcaaaatcttcaacattcaagtcaaagaggtcacggtgcaggactccaccaccaccatcgccaacaacctcacctccaccgtccaagtgtttacggacgacgactaccagctgccctacgtcgtcggcaacgggaccgagggatgcctgccggccttccctccgcaggtctttacgctgccgcagtacggttacgcgacgctgaaccgcgacaacacagaaaatcccaccgagaggagcagcttcttctgcctagagtactttcccagcaagatgctgagaacgggcaacaactttgagtttacctacaactttgaggaggtgcccttccactccagcttcgctcccagtcagaacctgttcaagctggccaacccgctggtggaccagtacttgtaccgcttcgtgagcacaaataacactggcggagtccagttcaacaagaacctggccgggagatacgccaacacctacaaaaactggttcccggggcccatgggccgaacccagggctggaacctgggctccggggtcaaccgcgccagtgtcagcgccttcgccacgaccaataggatggagctcgagggcgcgagttaccaggtgcccccgcagccgaacggcatgaccaacaacctccagggcagcaacacctatgccctggagaacactatgatcttcaacagccagccggcgaacccgggcaccaccgccacgtacctcgagggcaacatgctcatcaccagcgagagcgagacacagccggtgaaccgcgtggcgtacaacgtcggcgggcagatggccaccaacaaccagagctccaccactgcccccgcgaccggcacgtacaacctccaggaaatcgtgcccggcagcgtgtggatggagagggacgtgtacctccaaggacccatctgggccaagatcccagagacaggggcgcactttcacccctctccggccatgggcggattcggactcaaacacccaccgcccatgatgctcatcaagaacacgcctgtgcccggaaatatcaccagcttctcggacgtgcccgtcagcagcttcatcacccagtacagcaccgggcaggtcaccgtggagatggagtgggagctcaagaaggaaaactccaagaggtggaacccagagatccagtacacaaacaactacaacgacccccagtttgtggactttgccccggacagcaccggggaatacagaaccaccagacctatcggaacccgataccttacccgacccctttaa

SEQ ID NO: 135 - protein, 78 aa, Artificial Sequence
  synthetic sequence
MQTRSRESTTSRTTSSLRRETTPTSSTTTRTPSFRRSSPTTHPSGETSERQSFRPRKGFSNLLAWLKRVLRRPLPESG

SEQ ID NO: 136 - DNA, 237 bp, Artificial Sequence
  synthetic sequence
atgcagacgaggtcgcgcgagagcacgacatctcgtacaacgagcagcttgaggcgggagacaacccctacctcaagtacaaccacgcggacgccgagtttcaggagaagctcgccgacgacacatccttcgggggaaacctcggaaaggcagtctttcaggccaagaaaagggttctcgaaccttttggcctggttgaagagggtgctaagacggcccctaccggaaagcggatag

SEQ ID NO: 137 - protein, 724 aa, Artificial Sequence
  synthetic sequence
MSFVDHPPDWLEEVGEGLREFLGLEAGPPKPKPNQQHQDQARGLVLPGYNYLGPGNGLDRGEPVNRADEAAREHDKAYNEQLDAGDNPYLKYNHADAEFQEKLADDTSFGGNLGKAVFQAKKRVLEPFGLVEEGAKTAPTGKRIDDHFPKRKKARTEEDSKPSTSSDAEAGPSGSQQLQIPAQPASSLGADTMSAGGGGPLGDNNQGADGVGNASGDWHCDSTWMGDRVVTKSTRTWVLPSYNNHQYREIKSGSVDGSNANAYFGYSTPWGYFDFNRFHSHWSPRDWQRLINNYWGFRPRSLRVKIFNIQVKEVTVQDSTTTIANNLTSTVQVFTDDDYQLPYVVGNGTEGCLPAFPPQVFTLPQYGYATLNRDNTENPTERSSFFCLEYFPSKMLRTGNNFEFTYNFEEVPFHSSFAPSQNLFKLANPLVDQYLYRFVSTNNTGGVQFNKNLAGRYANTYKNWFPGPMGRTQGWNLGSGVNRASVSAFATTNRMELEGASYQVPPQPNGMTNNLQGSNTYALENTMIFNSQPANPGTTATYLEGNMLITSESETQPVNRVAYNVGGQMATNNQSSTTAPATGTYNLQEIVPGSVWMERDVYLQGPIWAKIPETGAHFHPSPAMGGFGLKHPPPMMLIKNTPVPGNITSFSDVPVSSFITQYSTGQVTVEMEWELKKENSKRWNPEIQYTNNYNDPQFVDFAPDSTGEYRTTRPIGTRYLTRPL

SEQ ID NO: 138 - DNA, 2175 bp, Artificial Sequence
  synthetic sequence
atgtcttttgttgatcaccctccagattggttggaagaagttggtgaaggtcttcgcgagtttttgggccttgaagcgggcccaccgaaaccaaaacccaatcagcagcatcaagatcaagcccgtggtcttgtgctgcctggttataactatctcggacccggaaacgggctcgatcgaggagagcctgtcaacagggcagacgaggcggcgcgagagcacgacaaggcttacaacgagcagcttgatgcgggagacaacccctacctcaagtacaaccacgcggacgccgagtttcaggagaagctcgccgacgacacatccttcgggggaaacctcggaaaggcagtctttcaggccaagaaaagggttctcgaaccttttggcctggttgaagagggtgctaagacggcccctaccggaaagcggatagacgaccactttccaaaaagaaagaaggctcggaccgaagaggactccaagccttccacctcgtcagacgccgaagctggacccagcggatcccagcagctgcaaatcccagcccaaccagcctcaagtttgggagctgatacaatgtctgcgggaggtggcggcccattgggcgacaataaccaaggtgccgatggagtgggcaatgcctcgggagattggcattgcgattccacgtggatgggggacagagtcgtcaccaagtccacccgaacctgggtgctgcccagctacaacaaccaccagtaccgagagatcaaaagcggctccgtcgacggaagcaacgccaacgcctactttggatacagcaccccctgggggtactttgactttaaccgcttccacagccactggagcccccgagactggcaaagactcatcaacaactactggggcttcagaccccggtccctcagagtcaaaatcttcaacattcaagtcaaagaggtcacggtgcaggactccaccaccaccatcgccaacaacctcacctccaccgtccaagtgtttacggacgacgactaccagctgccctacgtcgtcggcaacgggaccgagggatgcctgccggccttccctccgcaggtctttacgctgccgcagtacggttacgcgacgctgaaccgcgacaacacagaaaatcccaccgagaggagcagcttcttctgcctagagtactttcccagcaagatgctgagaacgggcaacaactttgagtttacctacaactttgaggaggtgcccttccactccagcttcgctcccagtcagaacctgttcaagctggccaacccgctggtggaccagtacttgtaccgcttcgtgagcacaaataacactggcggagtccagttcaacaagaacctggccgggagatacgccaacacctacaaaaactggttcccggggcccatgggccgaacccagggctggaacctgggctccggggtcaaccgcgccagtgtcagcgccttcgccacgaccaataggatggagctcgagggcgcgagttaccaggtgcccccgcagccgaacggcatgaccaacaacctccagggcagcaacacctatgccctggagaacactatgatcttcaacagccagccggcgaacccgggcaccaccgccacgtacctcgagggcaacatgctcatcaccagcgagagcgagacacagccggtgaaccgcgtggcgtacaacgtcggcgggcagatggccaccaacaaccagagctccaccactgcccccgcgaccggcacgtacaacctccaggaaatcgtgcccggcagcgtgtggatggagagggacgtgtacctccaaggacccatctgggccaagatcccagagacaggggcgcactttcacccctctccggccatgggcggattcggactcaaacacccaccgcccatgatgctcatcaagaacacgcctgtgcccggaaatatcaccagcttctcggacgtgcccgtcagcagcttcatcacccagtacagcaccgggcaggtcaccgtggagatggagtgggagctcaagaaggaaaactccaagaggtggaacccagagatccagtacacaaacaactacaacgacccccagtttgtggactttgccccggacagcaccggggaatacagaaccaccagacctatcggaacccgataccttacccgacccctttaa

SEQ ID NO: 139 - protein, 61 aa, Artificial Sequence; identical to SEQ ID NO: 35
  synthetic sequence

SEQ ID NO: 140 - DNA, 186 bp, Artificial Sequence; identical to SEQ ID NO: 36
  synthetic sequence

SEQ ID NO: 141 - protein, 725 aa, Artificial Sequence
  synthetic sequence
MSFVDHPPDWLEEVGEGLREFLGLEAGPPKPKPNGQQHQDQARGLVLPGYNYLGPGNGLDRGEPVNRADEVAREHDISYNEQLEAGDNPYLKYNHADAEFQEKLADDTSFGGNLGKAVFQAKKRVLEPFGLVEEGAKTAPTGKRIDDHFPKRKKARTEEDSKPSTSSDAEAGPSGSQQLQIPAQPASSLGADTMSAGGGGPLGDNNQGADGVGNASGDWHCDSTWMGDRVVTKSTRTWVLPSYNNHQYREIKSGSVDGSNANAYFGYSTPWGYFDFNRFHSHWSPRDWQRLINNYWGFRPRSLRVKIFNIQVKEVTVQDSTTTIANNLTSTVQVFTDDDYQLPYVVGNGTEGCLPAFPPQVFTLPQYGYATLNRDNTENPTERSSFFCLEYFPSKMLRTGNNFEFTYNFEEVPFHSSFAPSQNLFKLANPLVDQYLYRFVSTNNTGGVQFNKNLAGRYANTYKNWFPGPMGRTQGWNLGSGVNRASVSAFATTNRMELEGASYQVPPQPNGMTNNLQGSNTYALENTMIFNSQPANPGTTATYLEGNMLITSESETQPVNRVAYNVGGQMATNNQSSTTAPATGTYNLQEIVPGSVWMERDVYLQGPIWAKIPETGAHFHPSPAMGGFGLKHPPPMMLIKNTPVPGNITSFSDVPVSSFITQYSTGQVTVEMEWELKKENSKRWNPEIQYTNNYNDPQFVDFAPDSTGEYRTTRPIGTRYLTRPL

SEQ ID NO: 142 - DNA, 2178 bp, Artificial Sequence
  synthetic sequence
atgtcttttgttgatcaccctccagattggttggaagaagttggtgaaggtcttcgcgagtttttgggccttgaagcgggcccaccgaaaccaaaacccaatgggcagcagcatcaagatcaagcccgtggtcttgtgctgcctggttataactatctcggacccggaaacgggctcgatcgaggagagcctgtcaacagggcagacgaggtcgcgcgagagcacgacatctcgtacaacgagcagcttgaggcgggagacaacccctacctcaagtacaaccacgcggacgccgagtttcaggagaagctcgccgacgacacatccttcgggggaaacctcggaaaggcagtctttcaggccaagaaaagggttctcgaaccttttggcctggttgaagagggtgctaagacggcccctaccggaaagcggatagacgaccactttccaaaaagaaagaaggctcggaccgaagaggactccaagccttccacctcgtcagacgccgaagctggacccagcggatcccagcagctgcaaatcccagcccaaccagcctcaagtttgggagctgatacaatgtctgcgggaggtggcggcccattgggcgacaataaccaaggtgccgatggagtgggcaatgcctcgggagattggcattgcgattccacgtggatgggggacagagtcgtcaccaagtccacccgaacctgggtgctgcccagctacaacaaccaccagtaccgagagatcaaaagcggctccgtcgacggaagcaacgccaacgcctactttggatacagcaccccctgggggtactttgactttaaccgcttccacagccactggagcccccgagactggcaaagactcatcaacaactactggggcttcagaccccggtccctcagagtcaaaatcttcaacattcaagtcaaagaggtcacggtgcaggactccaccaccaccatcgccaacaacctcacctccaccgtccaagtgtttacggacgacgactaccagctgccctacgtcgtcggcaacgggaccgagggatgcctgccggccttccctccgcaggtctttacgctgccgcagtacggttacgcgacgctgaaccgcgacaacacagaaaatcccaccgagaggagcagcttcttctgcctagagtactttcccagcaagatgctgagaacgggcaacaactttgagtttacctacaactttgaggaggtgcccttccactccagcttcgctcccagtcagaacctgttcaagctggccaacccgctggtggaccagtacttgtaccgcttcgtgagcacaaataacactggcggagtccagttcaacaagaacctggccgggagatacgccaacacctacaaaaactggttcccggggcccatgggccgaacccagggctggaacctgggctccggggtcaaccgcgccagtgtcagcgccttcgccacgaccaataggatggagctcgagggcgcgagttaccaggtgcccccgcagccgaacggcatgaccaacaacctccagggcagcaacacctatgccctggagaacactatgatcttcaacagccagccggcgaacccgggcaccaccgccacgtacctcgagggcaacatgctcatcaccagcgagagcgagacacagccggtgaaccgcgtggcgtacaacgtcggcgggcagatggccaccaacaaccagagctccaccactgcccccgcgaccggcacgtacaacctccaggaaatcgtgcccggcagcgtgtggatggagagggacgtgtacctccaaggacccatctgggccaagatcccagagacaggggcgcactttcacccctctccggccatgggcggattcggactcaaacacccaccgcccatgatgctcatcaagaacacgcctgtgcccggaaatatcaccagcttctcggacgtgcccgtcagcagcttcatcacccagtacagcaccgggcaggtcaccgtggagatggagtgggagctcaagaaggaaaactccaagaggtggaacccagagatccagtacacaaacaactacaacgacccccagtttgtggactttgccccggacagcaccggggaatacagaaccaccagacctatcggaacccgataccttacccgacccctttaa

SEQ ID NO: 143 - protein, 111 aa, Artificial Sequence
  synthetic sequence
MGSSIKIKPVVLCCLVITISDPETGSIEESLSTGQTRSRESTTSRTTSSLRRETTPTSSTTTRTPSFRRSSPTTHPSGETSERQSFRPRKGFSNLLAWLKRVLRRPLPESG

SEQ ID NO: 144 - DNA, 336 bp, Artificial Sequence
  synthetic sequence
atgggcagcagcatcaagatcaagcccgtggtcttgtgctgcctggttataactatctcggacccggaaacgggctcgatcgaggagagcctgtcaacagggcagacgaggtcgcgcgagagcacgacatctcgtacaacgagcagcttgaggcgggagacaacccctacctcaagtacaaccacgcggacgccgagtttcaggagaagctcgccgacgacacatccttcgggggaaacctcggaaaggcagtctttcaggccaagaaaagggttctcgaaccttttggcctggttgaagagggtgctaagacggcccctaccggaaagcggatag

SEQ ID NO: 145 - protein, 723 aa, Artificial Sequence
  synthetic sequence
MSFVDHPPDWLEEVGEGLREFLGLEAGPPKPKPNRVHDQSRGLVFPGYKYLGPGNGLDRGEPVNRADEVAREHDISYNEQLEAGDNPYLKYNHADAEFQEKLADDTSFGGNLGKAVFQAKKRVLEPFGLVEEGAKTAPTGKRIDDHFPKRKKARTEEDSKPSTSSDAEAGPSGSQQLQIPAQPASSLGADTMSAGGGGPLGDNNQGADGVGNASGDWHCDSTWMGDRVVTKSTRTWVLPSYNNHQYREIKSGSVDGSNANAYFGYSTPWGYFDFNRFHSHWSPRDWQRLINNYWGFRPRSLRVKIFNIQVKEVTVQDSTTTIANNLTSTVQVFTDDDYQLPYVVGNGTEGCLPAFPPQVFTLPQYGYATLNRDNTENPTERSSFFCLEYFPSKMLRTGNNFEFTYNFEEVPFHSSFAPSQNLFKLANPLVDQYLYRFVSTNNTGGVQFNKNLAGRYANTYKNWFPGPMGRTQGWNLGSGVNRASVSAFATTNRMELEGASYQVPPQPNGMTNNLQGSNTYALENTMIFNSQPANPGTTATYLEGNMLITSESETQPVNRVAYNVGGQMATNNQSSTTAPATGTYNLQEIVPGSVWMERDVYLQGPIWAKIPETGAHFHPSPAMGGFGLKHPPPMMLIKNTPVPGNITSFSDVPVSSFITQYSTGQVTVEMEWELKKENSKRWNPEIQYTNNYNDPQFVDFAPDSTGEYRTTRPIGTRYLTRPL

SEQ ID NO: 146 - DNA, 2172 bp, Artificial Sequence
  synthetic sequence
atgtcttttgttgatcaccctccagattggttggaagaagttggtgaaggtcttcgcgagtttttgggccttgaagcgggcccaccgaaaccaaaacccaatagggtacatgatcaatctcgtggtcttgtgtttcctggttataagtatctcggacccggaaacgggctcgatcgaggagagcctgtcaacagggcagacgaggtcgcgcgagagcacgacatctcgtacaacgagcagcttgaggcgggagacaacccctacctcaagtacaaccacgcggacgccgagtttcaggagaagctcgccgacgacacatccttcgggggaaacctcggaaaggcagtctttcaggccaagaaaagggttctcgaaccttttggcctggttgaagagggtgctaagacggcccctaccggaaagcggatagacgaccactttccaaaaagaaagaaggctcggaccgaagaggactccaagccttccacctcgtcagacgccgaagctggacccagcggatcccagcagctgcaaatcccagcccaaccagcctcaagtttgggagctgatacaatgtctgcgggaggtggcggcccattgggcgacaataaccaaggtgccgatggagtgggcaatgcctcgggagattggcattgcgattccacgtggatgggggacagagtcgtcaccaagtccacccgaacctgggtgctgcccagctacaacaaccaccagtaccgagagatcaaaagcggctccgtcgacggaagcaacgccaacgcctactttggatacagcaccccctgggggtactttgactttaaccgcttccacagccactggagcccccgagactggcaaagactcatcaacaactactggggcttcagaccccggtccctcagagtcaaaatcttcaacattcaagtcaaagaggtcacggtgcaggactccaccaccaccatcgccaacaacctcacctccaccgtccaagtgtttacggacgacgactaccagctgccctacgtcgtcggcaacgggaccgagggatgcctgccggccttccctccgcaggtctttacgctgccgcagtacggttacgcgacgctgaaccgcgacaacacagaaaatcccaccgagaggagcagcttcttctgcctagagtactttcccagcaagatgctgagaacgggcaacaactttgagtttacctacaactttgaggaggtgcccttccactccagcttcgctcccagtcagaacctgttcaagctggccaacccgctggtggaccagtacttgtaccgcttcgtgagcacaaataacactggcggagtccagttcaacaagaacctggccgggagatacgccaacacctacaaaaactggttcccggggcccatgggccgaacccagggctggaacctgggctccggggtcaaccgcgccagtgtcagcgccttcgccacgaccaataggatggagctcgagggcgcgagttaccaggtgcccccgcagccgaacggcatgaccaacaacctccagggcagcaacacctatgccctggagaacactatgatcttcaacagccagccggcgaacccgggcaccaccgccacgtacctcgagggcaacatgctcatcaccagcgagagcgagacacagccggtgaaccgcgtggcgtacaacgtcggcgggcagatggccaccaacaaccagagctccaccactgcccccgcgaccggcacgtacaacctccaggaaatcgtgcccggcagcgtgtggatggagagggacgtgtacctccaaggacccatctgggccaagatcccagagacaggggcgcactttcacccctctccggccatgggcggattcggactcaaacacccaccgcccatgatgctcatcaagaacacgcctgtgcccggaaatatcaccagcttctcggacgtgcccgtcagcagcttcatcacccagtacagcaccgggcaggtcaccgtggagatggagtgggagctcaagaaggaaaactccaagaggtggaacccagagatccagtacacaaacaactacaacgacccccagtttgtggactttgccccggacagcaccggggaatacagaaccaccagacctatcggaacccgataccttacccgacccctttaa

SEQ ID NO: 147 - protein, 106 aa, Artificial Sequence
  synthetic sequence
MINLVVLCFLVISISDPETGSIEESLSTGQTRSRESTTSRTTSSLRRETTPTSSTTTRTPSFRRSSPTTHPSGETSERQSFRPRKGFSNLLAWLKRVLRRPLPESG

SEQ ID NO: 148 - DNA, 321 bp, Artificial Sequence
  synthetic sequence
atgatcaatctcgtggtcttgtgtttcctggttataagtatctcggacccggaaacgggctcgatcgaggagagcctgtcaacagggcagacgaggtcgcgcgagagcacgacatctcgtacaacgagcagcttgaggcgggagacaacccctacctcaagtacaaccacgcggacgccgagtttcaggagaagctcgccgacgacacatccttcgggggaaacctcggaaaggcagtctttcaggccaagaaaagggttctcgaaccttttggcctggttgaagagggtgctaagacggcccctaccggaaagcggatag

SEQ ID NO: 149 - protein, 725 aa, Artificial Sequence
  synthetic sequence
MSFVDHPPDWLEEVGEGLREFLDGLEAGPPKPKPNQQHQDQARGLVLPGYNYLGPGNGLDRGEPVNRADEVAREHDISYNEQLEAGDNPYLKYNHADAEFQEKLADDTSFGGNLGKAVFQAKKRVLEPFGLVEEGAKTAPTGKRIDDHFPKRKKARTEEDSKPSTSSDAEAGPSGSQQLQIPAQPASSLGADTMSAGGGGPLGDNNQGADGVGNASGDWHCDSTWMGDRVVTKSTRTWVLPSYNNHQYREIKSGSVDGSNANAYFGYSTPWGYFDFNRFHSHWSPRDWQRLINNYWGFRPRSLRVKIFNIQVKEVTVQDSTTTIANNLTSTVQVFTDDDYQLPYVVGNGTEGCLPAFPPQVFTLPQYGYATLNRDNTENPTERSSFFCLEYFPSKMLRTGNNFEFTYNFEEVPFHSSFAPSQNLFKLANPLVDQYLYRFVSTNNTGGVQFNKNLAGRYANTYKNWFPGPMGRTQGWNLGSGVNRASVSAFATTNRMELEGASYQVPPQPNGMTNNLQGSNTYALENTMIFNSQPANPGTTATYLEGNMLITSESETQPVNRVAYNVGGQMATNNQSSTTAPATGTYNLQEIVPGSVWMERDVYLQGPIWAKIPETGAHFHPSPAMGGFGLKHPPPMMLIKNTPVPGNITSFSDVPVSSFITQYSTGQVTVEMEWELKKENSKRWNPEIQYTNNYNDPQFVDFAPDSTGEYRTTRPIGTRYLTRPL

SEQ ID NO: 150 - DNA, 2178 bp, Artificial Sequence
  synthetic sequence
atgtcttttgttgatcaccctccagattggttggaagaagttggtgaaggccttcgcgagtttttggatggccttgaagcgggcccaccgaaaccaaaacccaatcagcagcatcaagatcaagcccgtggtcttgtgctgcctggttataactatctcggacccggaaacgggctcgatcgaggagagcctgtcaacagggcagacgaggtcgcgcgagagcacgacatctcgtacaacgagcagcttgaggcgggagacaacccctacctcaagtacaaccacgcggacgccgagtttcaggagaagctcgccgacgacacatccttcgggggaaacctcggaaaggcagtctttcaggccaagaaaagggttctcgaaccttttggcctggttgaagagggtgctaagacggcccctaccggaaagcggatagacgaccactttccaaaaagaaagaaggctcggaccgaagaggactccaagccttccacctcgtcagacgccgaagctggacccagcggatcccagcagctgcaaatcccagcccaaccagcctcaagtttgggagctgatacaatgtctgcgggaggtggcggcccattgggcgacaataaccaaggtgccgatggagtgggcaatgcctcgggagattggcattgcgattccacgtggatgggggacagagtcgtcaccaagtccacccgaacctgggtgctgcccagctacaacaaccaccagtaccgagagatcaaaagcggctccgtcgacggaagcaacgccaacgcctactttggatacagcaccccctgggggtactttgactttaaccgcttccacagccactggagcccccgagactggcaaagactcatcaacaactactggggcttcagaccccggtccctcagagtcaaaatcttcaacattcaagtcaaagaggtcacggtgcaggactccaccaccaccatcgccaacaacctcacctccaccgtccaagtgtttacggacgacgactaccagctgccctacgtcgtcggcaacgggaccgagggatgcctgccggccttccctccgcaggtctttacgctgccgcagtacggttacgcgacgctgaaccgcgacaacacagaaaatcccaccgagaggagcagcttcttctgcctagagtactttcccagcaagatgctgagaacgggcaacaactttgagtttacctacaactttgaggaggtgcccttccactccagcttcgctcccagtcagaacctgttcaagctggccaacccgctggtggaccagtacttgtaccgcttcgtgagcacaaataacactggcggagtccagttcaacaagaacctggccgggagatacgccaacacctacaaaaactggttcccggggcccatgggccgaacccagggctggaacctgggctccggggtcaaccgcgccagtgtcagcgccttcgccacgaccaataggatggagctcgagggcgcgagttaccaggtgcccccgcagccgaacggcatgaccaacaacctccagggcagcaacacctatgccctggagaacactatgatcttcaacagccagccggcgaacccgggcaccaccgccacgtacctcgagggcaacatgctcatcaccagcgagagcgagacacagccggtgaaccgcgtggcgtacaacgtcggcgggcagatggccaccaacaaccagagctccaccactgcccccgcgaccggcacgtacaacctccaggaaatcgtgcccggcagcgtgtggatggagagggacgtgtacctccaaggacccatctgggccaagatcccagagacaggggcgcactttcacccctctccggccatgggcggattcggactcaaacacccaccgcccatgatgctcatcaagaacacgcctgtgcccggaaatatcaccagcttctcggacgtgcccgtcagcagcttcatcacccagtacagcaccgggcaggtcaccgtggagatggagtgggagctcaagaaggaaaactccaagaggtggaacccagagatccagtacacaaacaactacaacgacccccagtttgtggactttgccccggacagcaccggggaatacagaaccaccagacctatcggaacccgataccttacccgacccctttaa

SEQ ID NO: 151 - protein, 122 aa, Artificial Sequence
  synthetic sequence
MALKRAHRNQNPISSIKIKPVVLCCLVITISDPETGSIEESLSTGQTRSRESTTSRTTSSLRRETTPTSSTTTRTPSFRRSSPTTHPSGETSERQSFRPRKGFSNLLAWLKRVLRRPLPESG

SEQ ID NO: 152 - DNA, 369 bp, Artificial Sequence
  synthetic sequence
atggccttgaagcgggcccaccgaaaccaaaacccaatcagcagcatcaagatcaagcccgtggtcttgtgctgcctggttataactatctcggacccggaaacgggctcgatcgaggagagcctgtcaacagggcagacgaggtcgcgcgagagcacgacatctcgtacaacgagcagcttgaggcgggagacaacccctacctcaagtacaaccacgcggacgccgagtttcaggagaagctcgccgacgacacatccttcgggggaaacctcggaaaggcagtctttcaggccaagaaaagggttctcgaaccttttggcctggttgaagagggtgctaagacggcccctaccggaaagcggatag

SEQ ID NO: 153 - protein, 724 aa, Artificial Sequence
  synthetic sequence
MSFVDHPPDWLEEVGEGLREFLGLYAGPPKPDPNQQHQDQARGLVLPGYNYLGPGNGLDRGEPVNRADEVAREHDISYNEQLEAGDNPYLKYNHADAEFQEKLADDTSFGGNLGKAVFQAKKRVLEPFGLVEEGAKTAPTGKRIDDHFPKRKKARTEEDSKPSTSSDAEAGPSGSQQLQIPAQPASSLGADTMSAGGGGPLGDNNQGADGVGNASGDWHCDSTWMGDRVVTKSTRTWVLPSYNNHQYREIKSGSVDGSNANAYFGYSTPWGYFDFNRFHSHWSPRDWQRLINNYWGFRPRSLRVKIFNIQVKEVTVQDSTTTIANNLTSTVQVFTDDDYQLPYVVGNGTEGCLPAFPPQVFTLPQYGYATLNRDNTENPTERSSFFCLEYFPSKMLRTGNNFEFTYNFEEVPFHSSFAPSQNLFKLANPLVDQYLYRFVSTNNTGGVQFNKNLAGRYANTYKNWFPGPMGRTQGWNLGSGVNRASVSAFATTNRMELEGASYQVPPQPNGMTNNLQGSNTYALENTMIFNSQPANPGTTATYLEGNMLITSESETQPVNRVAYNVGGQMATNNQSSTTAPATGTYNLQEIVPGSVWMERDVYLQGPIWAKIPETGAHFHPSPAMGGFGLKHPPPMMLIKNTPVPGNITSFSDVPVSSFITQYSTGQVTVEMEWELKKENSKRWNPEIQYTNNYNDPQFVDFAPDSTGEYRTTRPIGTRYLTRPL

SEQ ID NO: 154 - DNA, 2175 bp, Artificial Sequence
  synthetic sequence
atgtcttttgttgatcaccctccagattggttggaagaagttggtgaagggcttcgcgagtttttgggcctttatgcgggcccaccgaaaccagaccccaatcagcagcatcaagatcaagcccgtggtcttgtgctgcctggttataactatctcggacccggaaacgggctcgatcgaggagagcctgtcaacagggcagacgaggtcgcgcgagagcacgacatctcgtacaacgagcagcttgaggcgggagacaacccctacctcaagtacaaccacgcggacgccgagtttcaggagaagctcgccgacgacacatccttcgggggaaacctcggaaaggcagtctttcaggccaagaaaagggttctcgaaccttttggcctggttgaagagggtgctaagacggcccctaccggaaagcggatagacgaccactttccaaaaagaaagaaggctcggaccgaagaggactccaagccttccacctcgtcagacgccgaagctggacccagcggatcccagcagctgcaaatcccagcccaaccagcctcaagtttgggagctgatacaatgtctgcgggaggtggcggcccattgggcgacaataaccaaggtgccgatggagtgggcaatgcctcgggagattggcattgcgattccacgtggatgggggacagagtcgtcaccaagtccacccgaacctgggtgctgcccagctacaacaaccaccagtaccgagagatcaaaagcggctccgtcgacggaagcaacgccaacgcctactttggatacagcaccccctgggggtactttgactttaaccgcttccacagccactggagcccccgagactggcaaagactcatcaacaactactggggcttcagaccccggtccctcagagtcaaaatcttcaacattcaagtcaaagaggtcacggtgcaggactccaccaccaccatcgccaacaacctcacctccaccgtccaagtgtttacggacgacgactaccagctgccctacgtcgtcggcaacgggaccgagggatgcctgccggccttccctccgcaggtctttacgctgccgcagtacggttacgcgacgctgaaccgcgacaacacagaaaatcccaccgagaggagcagcttcttctgcctagagtactttcccagcaagatgctgagaacgggcaacaactttgagtttacctacaactttgaggaggtgcccttccactccagcttcgctcccagtcagaacctgttcaagctggccaacccgctggtggaccagtacttgtaccgcttcgtgagcacaaataacactggcggagtccagttcaacaagaacctggccgggagatacgccaacacctacaaaaactggttcccggggcccatgggccgaacccagggctggaacctgggctccggggtcaaccgcgccagtgtcagcgccttcgccacgaccaataggatggagctcgagggcgcgagttaccaggtgcccccgcagccgaacggcatgaccaacaacctccagggcagcaacacctatgccctggagaacactatgatcttcaacagccagccggcgaacccgggcaccaccgccacgtacctcgagggcaacatgctcatcaccagcgagagcgagacacagccggtgaaccgcgtggcgtacaacgtcggcgggcagatggccaccaacaaccagagctccaccactgcccccgcgaccggcacgtacaacctccaggaaatcgtgcccggcagcgtgtggatggagagggacgtgtacctccaaggacccatctgggccaagatcccagagacaggggcgcactttcacccctctccggccatgggcggattcggactcaaacacccaccgcccatgatgctcatcaagaacacgcctgtgcccggaaatatcaccagcttctcggacgtgcccgtcagcagcttcatcacccagtacagcaccgggcaggtcaccgtggagatggagtgggagctcaagaaggaaaactccaagaggtggaacccagagatccagtacacaaacaactacaacgacccccagtttgtggactttgccccggacagcaccggggaatacagaaccaccagacctatcggaacccgataccttacccgacccctttaa

SEQ ID NO: 155 - protein, 119 aa, Artificial Sequence
  synthetic sequence
MRAHRNQTPISSIKIKPVVLCCLVITISDPETGSIEESLSTGQTRSRESTTSRTTSSLRRETTPTSSTTTRTPSFRRSSPTTHPSGETSERQSFRPRKGFSNLLAWLKRVLRRPLPESG

SEQ ID NO: 156 - DNA, 360 bp, Artificial Sequence
  synthetic sequence
atgcgggcccaccgaaaccagaccccaatcagcagcatcaagatcaagcccgtggtcttgtgctgcctggttataactatctcggacccggaaacgggctcgatcgaggagagcctgtcaacagggcagacgaggtcgcgcgagagcacgacatctcgtacaacgagcagcttgaggcgggagacaacccctacctcaagtacaaccacgcggacgccgagtttcaggagaagctcgccgacgacacatccttcgggggaaacctcggaaaggcagtctttcaggccaagaaaagggttctcgaaccttttggcctggttgaagagggtgctaagacggcccctaccggaaagcggatag

SEQ ID NO: 157 - protein, 724 aa, Artificial Sequence
  synthetic sequence
MSFVDHPPDWLEEVGEGLREFLGLEAGPPKPKPNQQHQDQARGLVLPGYNYLGPGNGLDRGEPVNRADEVAREHDKAYDRQLDAGDNPYLKYNHADAEFQEKLADDTSFGGNLGKAVFQAKKRVLEPFGLVEEGAKTAPTGKRIDDHFPKRKKARTEEDSKPSTSSDAEAGPSGSQQLQIPAQPASSLGADTMSAGGGGPLGDNNQGADGVGNASGDWHCDSTWMGDRVVTKSTRTWVLPSYNNHQYREIKSGSVDGSNANAYFGYSTPWGYFDFNRFHSHWSPRDWQRLINNYWGFRPRSLRVKIFNIQVKEVTVQDSTTTIANNLTSTVQVFTDDDYQLPYVVGNGTEGCLPAFPPQVFTLPQYGYATLNRDNTENPTERSSFFCLEYFPSKMLRTGNNFEFTYNFEEVPFHSSFAPSQNLFKLANPLVDQYLYRFVSTNNTGGVQFNKNLAGRYANTYKNWFPGPMGRTQGWNLGSGVNRASVSAFATTNRMELEGASYQVPPQPNGMTNNLQGSNTYALENTMIFNSQPANPGTTATYLEGNMLITSESETQPVNRVAYNVGGQMATNNQSSTTAPATGTYNLQEIVPGSVWMERDVYLQGPIWAKIPETGAHFHPSPAMGGFGLKHPPPMMLIKNTPVPGNITSFSDVPVSSFITQYSTGQVTVEMEWELKKENSKRWNPEIQYTNNYNDPQFVDFAPDSTGEYRTTRPIGTRYLTRPL

SEQ ID NO: 158 - DNA, 2175 bp, Artificial Sequence
  synthetic sequence
atgtcttttgttgatcaccctccagattggttggaagaagttggtgaaggtcttcgcgagtttttgggccttgaagcgggcccaccgaaaccaaaacccaatcagcagcatcaagatcaagcccgtggtcttgtgctgcctggttataactatctcggacccggaaacgggctcgatcgaggagagcctgtcaacagggcagacgaggtcgcgcgagagcacgacaaagcctacgatcggcagcttgatgcgggagacaacccctacctcaagtacaaccacgcggacgccgagtttcaggagaagctcgccgacgacacatccttcgggggaaacctcggaaaggcagtctttcaggccaagaaaagggttctcgaaccttttggcctggttgaagagggtgctaagacggcccctaccggaaagcggatagacgaccactttccaaaaagaaagaaggctcggaccgaagaggactccaagccttccacctcgtcagacgccgaagctggacccagcggatcccagcagctgcaaatcccagcccaaccagcctcaagtttgggagctgatacaatgtctgcgggaggtggcggcccattgggcgacaataaccaaggtgccgatggagtgggcaatgcctcgggagattggcattgcgattccacgtggatgggggacagagtcgtcaccaagtccacccgaacctgggtgctgcccagctacaacaaccaccagtaccgagagatcaaaagcggctccgtcgacggaagcaacgccaacgcctactttggatacagcaccccctgggggtactttgactttaaccgcttccacagccactggagcccccgagactggcaaagactcatcaacaactactggggcttcagaccccggtccctcagagtcaaaatcttcaacattcaagtcaaagaggtcacggtgcaggactccaccaccaccatcgccaacaacctcacctccaccgtccaagtgtttacggacgacgactaccagctgccctacgtcgtcggcaacgggaccgagggatgcctgccggccttccctccgcaggtctttacgctgccgcagtacggttacgcgacgctgaaccgcgacaacacagaaaatcccaccgagaggagcagcttcttctgcctagagtactttcccagcaagatgctgagaacgggcaacaactttgagtttacctacaactttgaggaggtgcccttccactccagcttcgctcccagtcagaacctgttcaagctggccaacccgctggtggaccagtacttgtaccgcttcgtgagcacaaataacactggcggagtccagttcaacaagaacctggccgggagatacgccaacacctacaaaaactggttcccggggcccatgggccgaacccagggctggaacctgggctccggggtcaaccgcgccagtgtcagcgccttcgccacgaccaataggatggagctcgagggcgcgagttaccaggtgcccccgcagccgaacggcatgaccaacaacctccagggcagcaacacctatgccctggagaacactatgatcttcaacagccagccggcgaacccgggcaccaccgccacgtacctcgagggcaacatgctcatcaccagcgagagcgagacacagccggtgaaccgcgtggcgtacaacgtcggcgggcagatggccaccaacaaccagagctccaccactgcccccgcgaccggcacgtacaacctccaggaaatcgtgcccggcagcgtgtggatggagagggacgtgtacctccaaggacccatctgggccaagatcccagagacaggggcgcactttcacccctctccggccatgggcggattcggactcaaacacccaccgcccatgatgctcatcaagaacacgcctgtgcccggaaatatcaccagcttctcggacgtgcccgtcagcagcttcatcacccagtacagcaccgggcaggtcaccgtggagatggagtgggagctcaagaaggaaaactccaagaggtggaacccagagatccagtacacaaacaactacaacgacccccagtttgtggactttgccccggacagcaccggggaatacagaaccaccagacctatcggaacccgataccttacccgacccctttaa

SEQ ID NO: 159 - protein, 61 aa, Artificial Sequence; identical to SEQ ID NO: 35
  synthetic sequence

SEQ ID NO: 160 - DNA, 186 bp, Artificial Sequence; identical to SEQ ID NO: 36
  synthetic sequence

SEQ ID NO: 161 - protein, 725 aa, Artificial Sequence
  synthetic sequence
MSFVDHPPDWLEEVGEGLREFLGLEAGPPKPKPNQQHQDQARGLVLPGYNYLGPGNGLDRGEPVNRADEVAREHDISYNEQLEAYGDNPYLKYNHADAEFQEKLADDTSFGGNLGKAVFQAKKRVLEPFGLVEEGAKTAPTGKRIDDHFPKRKKARTEEDSKPSTSSDAEAGPSGSQQLQIPAQPASSLGADTMSAGGGGPLGDNNQGADGVGNASGDWHCDSTWMGDRVVTKSTRTWVLPSYNNHQYREIKSGSVDGSNANAYFGYSTPWGYFDFNRFHSHWSPRDWQRLINNYWGFRPRSLRVKIFNIQVKEVTVQDSTTTIANNLTSTVQVFTDDDYQLPYVVGNGTEGCLPAFPPQVFTLPQYGYATLNRDNTENPTERSSFFCLEYFPSKMLRTGNNFEFTYNFEEVPFHSSFAPSQNLFKLANPLVDQYLYRFVSTNNTGGVQFNKNLAGRYANTYKNWFPGPMGRTQGWNLGSGVNRASVSAFATTNRMELEGASYQVPPQPNGMTNNLQGSNTYALENTMIFNSQPANPGTTATYLEGNMLITSESETQPVNRVAYNVGGQMATNNQSSTTAPATGTYNLQEIVPGSVWMERDVYLQGPIWAKIPETGAHFHPSPAMGGFGLKHPPPMMLIKNTPVPGNITSFSDVPVSSFITQYSTGQVTVEMEWELKKENSKRWNPEIQYTNNYNDPQFVDFAPDSTGEYRTTRPIGTRYLTRPL

SEQ ID NO: 162 - DNA, 2178 bp, Artificial Sequence
  synthetic sequence
atgtcttttgttgatcaccctccagattggttggaagaagttggtgaaggtcttcgcgagtttttgggccttgaagcgggcccaccgaaaccaaaacccaatcagcagcatcaagatcaagcccgtggtcttgtgctgcctggttataactatctcggacccggaaacgggctcgatcgaggagagcctgtcaacagggcagacgaggtcgcgcgagagcacgacatctcgtacaacgagcagcttgaggcgtatggagacaacccctacctcaagtacaaccacgcggacgccgagtttcaggagaagctcgccgacgacacatccttcgggggaaacctcggaaaggcagtctttcaggccaagaaaagggttctcgaaccttttggcctggttgaagagggtgctaagacggcccctaccggaaagcggatagacgaccactttccaaaaagaaagaaggctcggaccgaagaggactccaagccttccacctcgtcagacgccgaagctggacccagcggatcccagcagctgcaaatcccagcccaaccagcctcaagtttgggagctgatacaatgtctgcgggaggtggcggcccattgggcgacaataaccaaggtgccgatggagtgggcaatgcctcgggagattggcattgcgattccacgtggatgggggacagagtcgtcaccaagtccacccgaacctgggtgctgcccagctacaacaaccaccagtaccgagagatcaaaagcggctccgtcgacggaagcaacgccaacgcctactttggatacagcaccccctgggggtactttgactttaaccgcttccacagccactggagcccccgagactggcaaagactcatcaacaactactggggcttcagaccccggtccctcagagtcaaaatcttcaacattcaagtcaaagaggtcacggtgcaggactccaccaccaccatcgccaacaacctcacctccaccgtccaagtgtttacggacgacgactaccagctgccctacgtcgtcggcaacgggaccgagggatgcctgccggccttccctccgcaggtctttacgctgccgcagtacggttacgcgacgctgaaccgcgacaacacagaaaatcccaccgagaggagcagcttcttctgcctagagtactttcccagcaagatgctgagaacgggcaacaactttgagtttacctacaactttgaggaggtgcccttccactccagcttcgctcccagtcagaacctgttcaagctggccaacccgctggtggaccagtacttgtaccgcttcgtgagcacaaataacactggcggagtccagttcaacaagaacctggccgggagatacgccaacacctacaaaaactggttcccggggcccatgggccgaacccagggctggaacctgggctccggggtcaaccgcgccagtgtcagcgccttcgccacgaccaataggatggagctcgagggcgcgagttaccaggtgcccccgcagccgaacggcatgaccaacaacctccagggcagcaacacctatgccctggagaacactatgatcttcaacagccagccggcgaacccgggcaccaccgccacgtacctcgagggcaacatgctcatcaccagcgagagcgagacacagccggtgaaccgcgtggcgtacaacgtcggcgggcagatggccaccaacaaccagagctccaccactgcccccgcgaccggcacgtacaacctccaggaaatcgtgcccggcagcgtgtggatggagagggacgtgtacctccaaggacccatctgggccaagatcccagagacaggggcgcactttcacccctctccggccatgggcggattcggactcaaacacccaccgcccatgatgctcatcaagaacacgcctgtgcccggaaatatcaccagcttctcggacgtgcccgtcagcagcttcatcacccagtacagcaccgggcaggtcaccgtggagatggagtgggagctcaagaaggaaaactccaagaggtggaacccagagatccagtacacaaacaactacaacgacccccagtttgtggactttgccccggacagcaccggggaatacagaaccaccagacctatcggaacccgataccttacccgacccctttaa

SEQ ID NO: 163 - protein, 60 aa, Artificial Sequence
  synthetic sequence
METTPTSSTTTRTPSFRRSSPTTHPSGETSERQSFRPRKGFSNLLAWLKRVLRRPLPESG

SEQ ID NO: 164 - DNA, 183 bp, Artificial Sequence
  synthetic sequence
atggagacaacccctacctcaagtacaaccacgcggacgccgagtttcaggagaagctcgccgacgacacatccttcgggggaaacctcggaaaggcagtctttcaggccaagaaaagggttctcgaaccttttggcctggttgaagagggtgctaagacggcccctaccggaaagcggatag

SEQ ID NO: 165 - protein, 724 aa, Artificial Sequence; identical to SEQ ID NO: 121
  synthetic sequence

SEQ ID NO: 166 - DNA, 2175 bp, Artificial Sequence
  synthetic sequence
atgtcttttgttgatcaccctccagattggttggaagaagttggtgaaggtcttcgcgagtttttgggccttgaagcgggcccaccgaaaccaaaacccaatcagcagcatcaagatcaagcccgtggtcttgtgctgcctggttatgtctatctcggacccggaaacgggctcgatcgaggagagcctgtcaacagggcagacgaggtcgcgcgagagcacgacatctcgtacaacgagcagcttgaggcgggagacaacccctacctcaagtacaaccacgcggacgccgagtttcaggagaagctcgccgacgacacatccttcgggggaaacctcggaaaggcagtctttcaggccaagaaaagggttctcgaaccttttggcctggttgaagagggtgctaagacggcccctaccggaaagcggatagacgaccactttccaaaaagaaagaaggctcggaccgaagaggactccaagccttccacctcgtcagacgccgaagctggacccagcggatcccagcagctgcaaatcccagcccaaccagcctcaagtttgggagctgatacaatgtctgcgggaggtggcggcccattgggcgacaataaccaaggtgccgatggagtgggcaatgcctcgggagattggcattgcgattccacgtggatgggggacagagtcgtcaccaagtccacccgaacctgggtgctgcccagctacaacaaccaccagtaccgagagatcaaaagcggctccgtcgacggaagcaacgccaacgcctactttggatacagcaccccctgggggtactttgactttaaccgcttccacagccactggagcccccgagactggcaaagactcatcaacaactactggggcttcagaccccggtccctcagagtcaaaatcttcaacattcaagtcaaagaggtcacggtgcaggactccaccaccaccatcgccaacaacctcacctccaccgtccaagtgtttacggacgacgactaccagctgccctacgtcgtcggcaacgggaccgagggatgcctgccggccttccctccgcaggtctttacgctgccgcagtacggttacgcgacgctgaaccgcgacaacacagaaaatcccaccgagaggagcagcttcttctgcctagagtactttcccagcaagatgctgagaacgggcaacaactttgagtttacctacaactttgaggaggtgcccttccactccagcttcgctcccagtcagaacctgttcaagctggccaacccgctggtggaccagtacttgtaccgcttcgtgagcacaaataacactggcggagtccagttcaacaagaacctggccgggagatacgccaacacctacaaaaactggttcccggggcccatgggccgaacccagggctggaacctgggctccggggtcaaccgcgccagtgtcagcgccttcgccacgaccaataggatggagctcgagggcgcgagttaccaggtgcccccgcagccgaacggcatgaccaacaacctccagggcagcaacacctatgccctggagaacactatgatcttcaacagccagccggcgaacccgggcaccaccgccacgtacctcgagggcaacatgctcatcaccagcgagagcgagacacagccggtgaaccgcgtggcgtacaacgtcggcgggcagatggccaccaacaaccagagctccaccactgcccccgcgaccggcacgtacaacctccaggaaatcgtgcccggcagcgtgtggatggagagggacgtgtacctccaaggacccatctgggccaagatcccagagacaggggcgcactttcacccctctccggccatgggcggattcggactcaaacacccaccgcccatgatgctcatcaagaacacgcctgtgcccggaaatatcaccagcttctcggacgtgcccgtcagcagcttcatcacccagtacagcaccgggcaggtcaccgtggagatggagtgggagctcaagaaggaaaactccaagaggtggaacccagagatccagtacacaaacaactacaacgacccccagtttgtggactttgccccggacagcaccggggaatacagaaccaccagacctatcggaacccgataccttacccgacccctttaa

SEQ ID NO: 167 - protein, 95 aa, Artificial Sequence
  synthetic sequence
MSISDPETGSIEESLSTGQTRSRESTTSRTTSSLRRETTPTSSTTTRTPSFRRSSPTTHPSGETSERQSFRPRKGFSNLLAWLKRVLRRPLPESG

SEQ ID NO: 168 - DNA, 288 bp, Artificial Sequence
  synthetic sequence
atgtctatctcggacccggaaacgggctcgatcgaggagagcctgtcaacagggcagacgaggtcgcgcgagagcacgacatctcgtacaacgagcagcttgaggcgggagacaacccctacctcaagtacaaccacgcggacgccgagtttcaggagaagctcgccgacgacacatccttcgggggaaacctcggaaaggcagtctttcaggccaagaaaagggttctcgaaccttttggcctggttgaagagggtgctaagacggcccctaccggaaagcggatag

SEQ ID NO: 169 - protein, 725 aa, Artificial Sequence
  synthetic sequence
MSFVDHPPDWLEEVGEGLREFLGLHEAGPPKPKPNQQHQDQARGLVLPGYNYLGPGNGLDRGEPVNRADEVAREHDISYNEQLEAGDNPYLKYNHADAEFQEKLADDTSFGGNLGKAVFQAKKRVLEPFGLVEEGAKTAPTGKRIDDHFPKRKKARTEEDSKPSTSSDAEAGPSGSQQLQIPAQPASSLGADTMSAGGGGPLGDNNQGADGVGNASGDWHCDSTWMGDRVVTKSTRTWVLPSYNNHQYREIKSGSVDGSNANAYFGYSTPWGYFDFNRFHSHWSPRDWQRLINNYWGFRPRSLRVKIFNIQVKEVTVQDSTTTIANNLTSTVQVFTDDDYQLPYVVGNGTEGCLPAFPPQVFTLPQYGYATLNRDNTENPTERSSFFCLEYFPSKMLRTGNNFEFTYNFEEVPFHSSFAPSQNLFKLANPLVDQYLYRFVSTNNTGGVQFNKNLAGRYANTYKNWFPGPMGRTQGWNLGSGVNRASVSAFATTNRMELEGASYQVPPQPNGMTNNLQGSNTYALENTMIFNSQPANPGTTATYLEGNMLITSESETQPVNRVAYNVGGQMATNNQSSTTAPATGTYNLQEIVPGSVWMERDVYLQGPIWAKIPETGAHFHPSPAMGGFGLKHPPPMMLIKNTPVPGNITSFSDVPVSSFITQYSTGQVTVEMEWELKKENSKRWNPEIQYTNNYNDPQFVDFAPDSTGEYRTTRPIGTRYLTRPL

SEQ ID NO: 170 - DNA, 2178 bp, Artificial Sequence
  synthetic sequence
atgtcttttgttgatcaccctccagattggttggaagaagttggtgaaggacttcgcgagtttttgggccttcatgaagcgggcccaccgaaaccaaaacccaatcagcagcatcaagatcaagcccgtggtcttgtgctgcctggttataactatctcggacccggaaacgggctcgatcgaggagagcctgtcaacagggcagacgaggtcgcgcgagagcacgacatctcgtacaacgagcagcttgaggcgggagacaacccctacctcaagtacaaccacgcggacgccgagtttcaggagaagctcgccgacgacacatccttcgggggaaacctcggaaaggcagtctttcaggccaagaaaagggttctcgaaccttttggcctggttgaagagggtgctaagacggcccctaccggaaagcggatagacgaccactttccaaaaagaaagaaggctcggaccgaagaggactccaagccttccacctcgtcagacgccgaagctggacccagcggatcccagcagctgcaaatcccagcccaaccagcctcaagtttgggagctgatacaatgtctgcgggaggtggcggcccattgggcgacaataaccaaggtgccgatggagtgggcaatgcctcgggagattggcattgcgattccacgtggatgggggacagagtcgtcaccaagtccacccgaacctgggtgctgcccagctacaacaaccaccagtaccgagagatcaaaagcggctccgtcgacggaagcaacgccaacgcctactttggatacagcaccccctgggggtactttgactttaaccgcttccacagccactggagcccccgagactggcaaagactcatcaacaactactggggcttcagaccccggtccctcagagtcaaaatcttcaacattcaagtcaaagaggtcacggtgcaggactccaccaccaccatcgccaacaacctcacctccaccgtccaagtgtttacggacgacgactaccagctgccctacgtcgtcggcaacgggaccgagggatgcctgccggccttccctccgcaggtctttacgctgccgcagtacggttacgcgacgctgaaccgcgacaacacagaaaatcccaccgagaggagcagcttcttctgcctagagtactttcccagcaagatgctgagaacgggcaacaactttgagtttacctacaactttgaggaggtgcccttccactccagcttcgctcccagtcagaacctgttcaagctggccaacccgctggtggaccagtacttgtaccgcttcgtgagcacaaataacactggcggagtccagttcaacaagaacctggccgggagatacgccaacacctacaaaaactggttcccggggcccatgggccgaacccagggctggaacctgggctccggggtcaaccgcgccagtgtcagcgccttcgccacgaccaataggatggagctcgagggcgcgagttaccaggtgcccccgcagccgaacggcatgaccaacaacctccagggcagcaacacctatgccctggagaacactatgatcttcaacagccagccggcgaacccgggcaccaccgccacgtacctcgagggcaacatgctcatcaccagcgagagcgagacacagccggtgaaccgcgtggcgtacaacgtcggcgggcagatggccaccaacaaccagagctccaccactgcccccgcgaccggcacgtacaacctccaggaaatcgtgcccggcagcgtgtggatggagagggacgtgtacctccaaggacccatctgggccaagatcccagagacaggggcgcactttcacccctctccggccatgggcggattcggactcaaacacccaccgcccatgatgctcatcaagaacacgcctgtgcccggaaatatcaccagcttctcggacgtgcccgtcagcagcttcatcacccagtacagcaccgggcaggtcaccgtggagatggagtgggagctcaagaaggaaaactccaagaggtggaacccagagatccagtacacaaacaactacaacgacccccagtttgtggactttgccccggacagcaccggggaatacagaaccaccagacctatcggaacccgataccttacccgacccctttaa

SEQ ID NO: 171 - protein, 120 aa, Artificial Sequence
  synthetic sequence
MKRAHRNQNPISSIKIKPVVLCCLVITISDPETGSIEESLSTGQTRSRESTTSRTTSSLRRETTPTSSTTTRTPSFRRSSPTTHPSGETSERQSFRPRKGFSNLLAWLKRVLRRPLPESG

SEQ ID NO: 172 - DNA, 363 bp, Artificial Sequence
  synthetic sequence
atgaagcgggcccaccgaaaccaaaacccaatcagcagcatcaagatcaagcccgtggtcttgtgctgcctggttataactatctcggacccggaaacgggctcgatcgaggagagcctgtcaacagggcagacgaggtcgcgcgagagcacgacatctcgtacaacgagcagcttgaggcgggagacaacccctacctcaagtacaaccacgcggacgccgagtttcaggagaagctcgccgacgacacatccttcgggggaaacctcggaaaggcagtctttcaggccaagaaaagggttctcgaaccttttggcctggttgaagagggtgctaagacggcccctaccggaaagcggatag

SEQ ID NO: 173 - protein, 724 aa, Artificial Sequence
  synthetic sequence
MSFVDHPPDWLEEVGEGLREFLGLEAGPPKPKPNEQHQDYARGLVLPGYNYLGPGNGLDRGEPVNRADEVAREHDISYNEQLEAGDNPYLKYNHADAEFQEKLADDTSFGGNLGKAVFQAKKRVLEPFGLVEEGAKTAPTGKRIDDHFPKRKKARTEEDSKPSTSSDAEAGPSGSQQLQIPAQPASSLGADTMSAGGGGPLGDNNQGADGVGNASGDWHCDSTWMGDRVVTKSTRTWVLPSYNNHQYREIKSGSVDGSNANAYFGYSTPWGYFDFNRFHSHWSPRDWQRLINNYWGFRPRSLRVKIFNIQVKEVTVQDSTTTIANNLTSTVQVFTDDDYQLPYVVGNGTEGCLPAFPPQVFTLPQYGYATLNRDNTENPTERSSFFCLEYFPSKMLRTGNNFEFTYNFEEVPFHSSFAPSQNLFKLANPLVDQYLYRFVSTNNTGGVQFNKNLAGRYANTYKNWFPGPMGRTQGWNLGSGVNRASVSAFATTNRMELEGASYQVPPQPNGMTNNLQGSNTYALENTMIFNSQPANPGTTATYLEGNMLITSESETQPVNRVAYNVGGQMATNNQSSTTAPATGTYNLQEIVPGSVWMERDVYLQGPIWAKIPETGAHFHPSPAMGGFGLKHPPPMMLIKNTPVPGNITSFSDVPVSSFITQYSTGQVTVEMEWELKKENSKRWNPEIQYTNNYNDPQFVDFAPDSTGEYRTTRPIGTRYLTRPL

SEQ ID NO: 174 - DNA, 2175 bp, Artificial Sequence
  synthetic sequence
atgtcttttgttgatcaccctccagattggttggaagaagttggtgaaggtcttcgcgagtttttgggccttgaagcgggcccaccgaaaccaaaacccaatgagcagcatcaagattacgcccgtggtcttgtgctgcctggttataactatctcggacccggaaacgggctcgatcgaggagagcctgtcaacagggcagacgaggtcgcgcgagagcacgacatctcgtacaacgagcagcttgaggcgggagacaacccctacctcaagtacaaccacgcggacgccgagtttcaggagaagctcgccgacgacacatccttcgggggaaacctcggaaaggcagtctttcaggccaagaaaagggttctcgaaccttttggcctggttgaagagggtgctaagacggcccctaccggaaagcggatagacgaccactttccaaaaagaaagaaggctcggaccgaagaggactccaagccttccacctcgtcagacgccgaagctggacccagcggatcccagcagctgcaaatcccagcccaaccagcctcaagtttgggagctgatacaatgtctgcgggaggtggcggcccattgggcgacaataaccaaggtgccgatggagtgggcaatgcctcgggagattggcattgcgattccacgtggatgggggacagagtcgtcaccaagtccacccgaacctgggtgctgcccagctacaacaaccaccagtaccgagagatcaaaagcggctccgtcgacggaagcaacgccaacgcctactttggatacagcaccccctgggggtactttgactttaaccgcttccacagccactggagcccccgagactggcaaagactcatcaacaactactggggcttcagaccccggtccctcagagtcaaaatcttcaacattcaagtcaaagaggtcacggtgcaggactccaccaccaccatcgccaacaacctcacctccaccgtccaagtgtttacggacgacgactaccagctgccctacgtcgtcggcaacgggaccgagggatgcctgccggccttccctccgcaggtctttacgctgccgcagtacggttacgcgacgctgaaccgcgacaacacagaaaatcccaccgagaggagcagcttcttctgcctagagtactttcccagcaagatgctgagaacgggcaacaactttgagtttacctacaactttgaggaggtgcccttccactccagcttcgctcccagtcagaacctgttcaagctggccaacccgctggtggaccagtacttgtaccgcttcgtgagcacaaataacactggcggagtccagttcaacaagaacctggccgggagatacgccaacacctacaaaaactggttcccggggcccatgggccgaacccagggctggaacctgggctccggggtcaaccgcgccagtgtcagcgccttcgccacgaccaataggatggagctcgagggcgcgagttaccaggtgcccccgcagccgaacggcatgaccaacaacctccagggcagcaacacctatgccctggagaacactatgatcttcaacagccagccggcgaacccgggcaccaccgccacgtacctcgagggcaacatgctcatcaccagcgagagcgagacacagccggtgaaccgcgtggcgtacaacgtcggcgggcagatggccaccaacaaccagagctccaccactgcccccgcgaccggcacgtacaacctccaggaaatcgtgcccggcagcgtgtggatggagagggacgtgtacctccaaggacccatctgggccaagatcccagagacaggggcgcactttcacccctctccggccatgggcggattcggactcaaacacccaccgcccatgatgctcatcaagaacacgcctgtgcccggaaatatcaccagcttctcggacgtgcccgtcagcagcttcatcacccagtacagcaccgggcaggtcaccgtggagatggagtgggagctcaagaaggaaaactccaagaggtggaacccagagatccagtacacaaacaactacaacgacccccagtttgtggactttgccccggacagcaccggggaatacagaaccaccagacctatcggaacccgataccttacccgacccctttaa

SEQ ID NO: 175 - protein, 110 aa, Artificial Sequence
  synthetic sequence
MSSIKITPVVLCCLVITISDPETGSIEESLSTGQTRSRESTTSRTTSSLRRETTPTSSTTTRTPSFRRSSPTTHPSGETSERQSFRPRKGFSNLLAWLKRVLRRPLPESG

SEQ ID NO: 176 - DNA, 333 bp, Artificial Sequence
  synthetic sequence
atgagcagcatcaagattacgcccgtggtcttgtgctgcctggttataactatctcggacccggaaacgggctcgatcgaggagagcctgtcaacagggcagacgaggtcgcgcgagagcacgacatctcgtacaacgagcagcttgaggcgggagacaacccctacctcaagtacaaccacgcggacgccgagtttcaggagaagctcgccgacgacacatccttcgggggaaacctcggaaaggcagtctttcaggccaagaaaagggttctcgaaccttttggcctggttgaagagggtgctaagacggcccctaccggaaagcggatag

SEQ ID NO: 177 - protein, 724 aa, Artificial Sequence
  synthetic sequence
MSFVDHPPDWLEEVGEGLREFLGLEAGPPKPKPNGQHQDQARGLVLPGYNYLGPGNGLDRGEPVNRADEVAREHDISYNEQLEAGDNPYLKYNHADAEFQEKLADDTSFGGNLGKAVFQAKKRVLEPFGLVEEGAKTAPTGKRIDDHFPKRKKARTEEDSKPSTSSDAEAGPSGSQQLQIPAQPASSLGADTMSAGGGGPLGDNNQGADGVGNASGDWHCDSTWMGDRVVTKSTRTWVLPSYNNHQYREIKSGSVDGSNANAYFGYSTPWGYFDFNRFHSHWSPRDWQRLINNYWGFRPRSLRVKIFNIQVKEVTVQDSTTTIANNLTSTVQVFTDDDYQLPYVVGNGTEGCLPAFPPQVFTLPQYGYATLNRDNTENPTERSSFFCLEYFPSKMLRTGNNFEFTYNFEEVPFHSSFAPSQNLFKLANPLVDQYLYRFVSTNNTGGVQFNKNLAGRYANTYKNWFPGPMGRTQGWNLGSGVNRASVSAFATTNRMELEGASYQVPPQPNGMTNNLQGSNTYALENTMIFNSQPANPGTTATYLEGNMLITSESETQPVNRVAYNVGGQMATNNQSSTTAPATGTYNLQEIVPGSVWMERDVYLQGPIWAKIPETGAHFHPSPAMGGFGLKHPPPMMLIKNTPVPGNITSFSDVPVSSFITQYSTGQVTVEMEWELKKENSKRWNPEIQYTNNYNDPQFVDFAPDSTGEYRTTRPIGTRYLTRPL

SEQ ID NO: 178 - DNA, 2175 bp, Artificial Sequence
  synthetic sequence
atgtcttttgttgatcaccctccagattggttggaagaagttggtgaaggtcttcgcgagtttttgggccttgaagcgggcccaccgaaaccaaaacccaatggacagcatcaagatcaagcccgtggtcttgtgctgcctggttataactatctcggacccggaaacgggctcgatcgaggagagcctgtcaacagggcagacgaggtcgcgcgagagcacgacatctcgtacaacgagcagcttgaggcgggagacaacccctacctcaagtacaaccacgcggacgccgagtttcaggagaagctcgccgacgacacatccttcgggggaaacctcggaaaggcagtctttcaggccaagaaaagggttctcgaaccttttggcctggttgaagagggtgctaagacggcccctaccggaaagcggatagacgaccactttccaaaaagaaagaaggctcggaccgaagaggactccaagccttccacctcgtcagacgccgaagctggacccagcggatcccagcagctgcaaatcccagcccaaccagcctcaagtttgggagctgatacaatgtctgcgggaggtggcggcccattgggcgacaataaccaaggtgccgatggagtgggcaatgcctcgggagattggcattgcgattccacgtggatgggggacagagtcgtcaccaagtccacccgaacctgggtgctgcccagctacaacaaccaccagtaccgagagatcaaaagcggctccgtcgacggaagcaacgccaacgcctactttggatacagcaccccctgggggtactttgactttaaccgcttccacagccactggagcccccgagactggcaaagactcatcaacaactactggggcttcagaccccggtccctcagagtcaaaatcttcaacattcaagtcaaagaggtcacggtgcaggactccaccaccaccatcgccaacaacctcacctccaccgtccaagtgtttacggacgacgactaccagctgccctacgtcgtcggcaacgggaccgagggatgcctgccggccttccctccgcaggtctttacgctgccgcagtacggttacgcgacgctgaaccgcgacaacacagaaaatcccaccgagaggagcagcttcttctgcctagagtactttcccagcaagatgctgagaacgggcaacaactttgagtttacctacaactttgaggaggtgcccttccactccagcttcgctcccagtcagaacctgttcaagctggccaacccgctggtggaccagtacttgtaccgcttcgtgagcacaaataacactggcggagtccagttcaacaagaacctggccgggagatacgccaacacctacaaaaactggttcccggggcccatgggccgaacccagggctggaacctgggctccggggtcaaccgcgccagtgtcagcgccttcgccacgaccaataggatggagctcgagggcgcgagttaccaggtgcccccgcagccgaacggcatgaccaacaacctccagggcagcaacacctatgccctggagaacactatgatcttcaacagccagccggcgaacccgggcaccaccgccacgtacctcgagggcaacatgctcatcaccagcgagagcgagacacagccggtgaaccgcgtggcgtacaacgtcggcgggcagatggccaccaacaaccagagctccaccactgcccccgcgaccggcacgtacaacctccaggaaatcgtgcccggcagcgtgtggatggagagggacgtgtacctccaaggacccatctgggccaagatcccagagacaggggcgcactttcacccctctccggccatgggcggattcggactcaaacacccaccgcccatgatgctcatcaagaacacgcctgtgcccggaaatatcaccagcttctcggacgtgcccgtcagcagcttcatcacccagtacagcaccgggcaggtcaccgtggagatggagtgggagctcaagaaggaaaactccaagaggtggaacccagagatccagtacacaaacaactacaacgacccccagtttgtggactttgccccggacagcaccggggaatacagaaccaccagacctatcggaacccgataccttacccgacccctttaa

SEQ ID NO: 179 - protein, 110 aa, Artificial Sequence
  synthetic sequence
MDSIKIKPVVLCCLVITISDPETGSIEESLSTGQTRSRESTTSRTTSSLRRETTPTSSTTTRTPSFRRSSPTTHPSGETSERQSFRPRKGFSNLLAWLKRVLRRPLPESG

SEQ ID NO: 180 - DNA, 333 bp, Artificial Sequence
  synthetic sequence
atggacagcatcaagatcaagcccgtggtcttgtgctgcctggttataactatctcggacccggaaacgggctcgatcgaggagagcctgtcaacagggcagacgaggtcgcgcgagagcacgacatctcgtacaacgagcagcttgaggcgggagacaacccctacctcaagtacaaccacgcggacgccgagtttcaggagaagctcgccgacgacacatccttcgggggaaacctcggaaaggcagtctttcaggccaagaaaagggttctcgaaccttttggcctggttgaagagggtgctaagacggcccctaccggaaagcggatag

SEQ ID NO: 181 - protein, 724 aa, Artificial Sequence
  synthetic sequence
MSFVDHPPDWLEEVGEGLREFLGLEAGPPKPKPVQQHWDQARGLVLPGYEYLGPGNGLDRGEPVNRADEVAREHDISYNEQLEAGDNPYLKYNHADAEFQEKLADDTSFGGNLGKAVFQAKKRVLEPFGLVEEGAKTAPTGKRIDDHFPKRKKARTEEDSKPSTSSDAEAGPSGSQQLQIPAQPASSLGADTMSAGGGGPLGDNNQGADGVGNASGDWHCDSTWMGDRVVTKSTRTWVLPSYNNHQYREIKSGSVDGSNANAYFGYSTPWGYFDFNRFHSHWSPRDWQRLINNYWGFRPRSLRVKIFNIQVKEVTVQDSTTTIANNLTSTVQVFTDDDYQLPYVVGNGTEGCLPAFPPQVFTLPQYGYATLNRDNTENPTERSSFFCLEYFPSKMLRTGNNFEFTYNFEEVPFHSSFAPSQNLFKLANPLVDQYLYRFVSTNNTGGVQFNKNLAGRYANTYKNWFPGPMGRTQGWNLGSGVNRASVSAFATTNRMELEGASYQVPPQPNGMTNNLQGSNTYALENTMIFNSQPANPGTTATYLEGNMLITSESETQPVNRVAYNVGGQMATNNQSSTTAPATGTYNLQEIVPGSVWMERDVYLQGPIWAKIPETGAHFHPSPAMGGFGLKHPPPMMLIKNTPVPGNITSFSDVPVSSFITQYSTGQVTVEMEWELKKENSKRWNPEIQYTNNYNDPQFVDFAPDSTGEYRTTRPIGTRYLTRPL

SEQ ID NO: 182 - DNA, 2175 bp, Artificial Sequence
  synthetic sequence
atgtcttttgttgatcaccctccagattggttggaagaagttggtgaaggtcttcgcgagtttttgggccttgaagcgggcccaccgaaaccaaaacccgtccagcagcattgggatcaagcccgtggtcttgtgctgcctggttatgagtatctcggacccggaaacgggctcgatcgaggagagcctgtcaacagggcagacgaggtcgcgcgagagcacgacatctcgtacaacgagcagcttgaggcgggagacaacccctacctcaagtacaaccacgcggacgccgagtttcaggagaagctcgccgacgacacatccttcgggggaaacctcggaaaggcagtctttcaggccaagaaaagggttctcgaaccttttggcctggttgaagagggtgctaagacggcccctaccggaaagcggatagacgaccactttccaaaaagaaagaaggctcggaccgaagaggactccaagccttccacctcgtcagacgccgaagctggacccagcggatcccagcagctgcaaatcccagcccaaccagcctcaagtttgggagctgatacaatgtctgcgggaggtggcggcccattgggcgacaataaccaaggtgccgatggagtgggcaatgcctcgggagattggcattgcgattccacgtggatgggggacagagtcgtcaccaagtccacccgaacctgggtgctgcccagctacaacaaccaccagtaccgagagatcaaaagcggctccgtcgacggaagcaacgccaacgcctactttggatacagcaccccctgggggtactttgactttaaccgcttccacagccactggagcccccgagactggcaaagactcatcaacaactactggggcttcagaccccggtccctcagagtcaaaatcttcaacattcaagtcaaagaggtcacggtgcaggactccaccaccaccatcgccaacaacctcacctccaccgtccaagtgtttacggacgacgactaccagctgccctacgtcgtcggcaacgggaccgagggatgcctgccggccttccctccgcaggtctttacgctgccgcagtacggttacgcgacgctgaaccgcgacaacacagaaaatcccaccgagaggagcagcttcttctgcctagagtactttcccagcaagatgctgagaacgggcaacaactttgagtttacctacaactttgaggaggtgcccttccactccagcttcgctcccagtcagaacctgttcaagctggccaacccgctggtggaccagtacttgtaccgcttcgtgagcacaaataacactggcggagtccagttcaacaagaacctggccgggagatacgccaacacctacaaaaactggttcccggggcccatgggccgaacccagggctggaacctgggctccggggtcaaccgcgccagtgtcagcgccttcgccacgaccaataggatggagctcgagggcgcgagttaccaggtgcccccgcagccgaacggcatgaccaacaacctccagggcagcaacacctatgccctggagaacactatgatcttcaacagccagccggcgaacccgggcaccaccgccacgtacctcgagggcaacatgctcatcaccagcgagagcgagacacagccggtgaaccgcgtggcgtacaacgtcggcgggcagatggccaccaacaaccagagctccaccactgcccccgcgaccggcacgtacaacctccaggaaatcgtgcccggcagcgtgtggatggagagggacgtgtacctccaaggacccatctgggccaagatcccagagacaggggcgcactttcacccctctccggccatgggcggattcggactcaaacacccaccgcccatgatgctcatcaagaacacgcctgtgcccggaaatatcaccagcttctcggacgtgcccgtcagcagcttcatcacccagtacagcaccgggcaggtcaccgtggagatggagtgggagctcaagaaggaaaactccaagaggtggaacccagagatccagtacacaaacaactacaacgacccccagtttgtggactttgccccggacagcaccggggaatacagaaccaccagacctatcggaacccgataccttacccgacccctttaa

SEQ ID NO: 183 - protein, 95 aa, Artificial Sequence; identical to SEQ ID NO: 167
  synthetic sequence

SEQ ID NO: 184 - DNA, 288 bp, Artificial Sequence
  synthetic sequence
atgagtatctcggacccggaaacgggctcgatcgaggagagcctgtcaacagggcagacgaggtcgcgcgagagcacgacatctcgtacaacgagcagcttgaggcgggagacaacccctacctcaagtacaaccacgcggacgccgagtttcaggagaagctcgccgacgacacatccttcgggggaaacctcggaaaggcagtctttcaggccaagaaaagggttctcgaaccttttggcctggttgaagagggtgctaagacggcccctaccggaaagcggatag

SEQ ID NO: 185 - protein, 727 aa, Artificial Sequence
  synthetic sequence
MSFVDHPPDWLEEVGEGLREFLGLEAGPPKPKPNQQISEHSPGSRGLVLPGYRYLGPGNGLDRGEPVNRADEVAREHDISYNEQLEAGDNPYLKYNHADAEFQEKLADDTSFGGNLGKAVFQAKKRVLEPFGLVEEGAKTAPTGKRIDDHFPKRKKARTEEDSKPSTSSDAEAGPSGSQQLQIPAQPASSLGADTMSAGGGGPLGDNNQGADGVGNASGDWHCDSTWMGDRVVTKSTRTWVLPSYNNHQYREIKSGSVDGSNANAYFGYSTPWGYFDFNRFHSHWSPRDWQRLINNYWGFRPRSLRVKIFNIQVKEVTVQDSTTTIANNLTSTVQVFTDDDYQLPYVVGNGTEGCLPAFPPQVFTLPQYGYATLNRDNTENPTERSSFFCLEYFPSKMLRTGNNFEFTYNFEEVPFHSSFAPSQNLFKLANPLVDQYLYRFVSTNNTGGVQFNKNLAGRYANTYKNWFPGPMGRTQGWNLGSGVNRASVSAFATTNRMELEGASYQVPPQPNGMTNNLQGSNTYALENTMIFNSQPANPGTTATYLEGNMLITSESETQPVNRVAYNVGGQMATNNQSSTTAPATGTYNLQEIVPGSVWMERDVYLQGPIWAKIPETGAHFHPSPAMGGFGLKHPPPMMLIKNTPVPGNITSFSDVPVSSFITQYSTGQVTVEMEWELKKENSKRWNPEIQYTNNYNDPQFVDFAPDSTGEYRTTRPIGTRYLTRPL

SEQ ID NO: 186 - DNA, 2184 bp, Artificial Sequence
  synthetic sequence
atgtcttttgttgatcaccctccagattggttggaagaagttggtgaaggtcttcgcgagtttttgggccttgaagcgggcccaccgaaaccaaaacccaatcagcagatctcggaacatagtcctggcagtcgtggtcttgtgctgcctggttataggtatctcggacccggaaacgggctcgatcgaggagagcctgtcaacagggcagacgaggtcgcgcgagagcacgacatctcgtacaacgagcagcttgaggcgggagacaacccctacctcaagtacaaccacgcggacgccgagtttcaggagaagctcgccgacgacacatccttcgggggaaacctcggaaaggcagtctttcaggccaagaaaagggttctcgaaccttttggcctggttgaagagggtgctaagacggcccctaccggaaagcggatagacgaccactttccaaaaagaaagaaggctcggaccgaagaggactccaagccttccacctcgtcagacgccgaagctggacccagcggatcccagcagctgcaaatcccagcccaaccagcctcaagtttgggagctgatacaatgtctgcgggaggtggcggcccattgggcgacaataaccaaggtgccgatggagtgggcaatgcctcgggagattggcattgcgattccacgtggatgggggacagagtcgtcaccaagtccacccgaacctgggtgctgcccagctacaacaaccaccagtaccgagagatcaaaagcggctccgtcgacggaagcaacgccaacgcctactttggatacagcaccccctgggggtactttgactttaaccgcttccacagccactggagcccccgagactggcaaagactcatcaacaactactggggcttcagaccccggtccctcagagtcaaaatcttcaacattcaagtcaaagaggtcacggtgcaggactccaccaccaccatcgccaacaacctcacctccaccgtccaagtgtttacggacgacgactaccagctgccctacgtcgtcggcaacgggaccgagggatgcctgccggccttccctccgcaggtctttacgctgccgcagtacggttacgcgacgctgaaccgcgacaacacagaaaatcccaccgagaggagcagcttcttctgcctagagtactttcccagcaagatgctgagaacgggcaacaactttgagtttacctacaactttgaggaggtgcccttccactccagcttcgctcccagtcagaacctgttcaagctggccaacccgctggtggaccagtacttgtaccgcttcgtgagcacaaataacactggcggagtccagttcaacaagaacctggccgggagatacgccaacacctacaaaaactggttcccggggcccatgggccgaacccagggctggaacctgggctccggggtcaaccgcgccagtgtcagcgccttcgccacgaccaataggatggagctcgagggcgcgagttaccaggtgcccccgcagccgaacggcatgaccaacaacctccagggcagcaacacctatgccctggagaacactatgatcttcaacagccagccggcgaacccgggcaccaccgccacgtacctcgagggcaacatgctcatcaccagcgagagcgagacacagccggtgaaccgcgtggcgtacaacgtcggcgggcagatggccaccaacaaccagagctccaccactgcccccgcgaccggcacgtacaacctccaggaaatcgtgcccggcagcgtgtggatggagagggacgtgtacctccaaggacccatctgggccaagatcccagagacaggggcgcactttcacccctctccggccatgggcggattcggactcaaacacccaccgcccatgatgctcatcaagaacacgcctgtgcccggaaatatcaccagcttctcggacgtgcccgtcagcagcttcatcacccagtacagcaccgggcaggtcaccgtggagatggagtgggagctcaagaaggaaaactccaagaggtggaacccagagatccagtacacaaacaactacaacgacccccagtttgtggactttgccccggacagcaccggggaatacagaaccaccagacctatcggaacccgataccttacccgacccctttaa

SEQ ID NO: 187 - protein, 105 aa, Artificial Sequence
  synthetic sequence
LAVVVLCCLVIGISDPETGSIEESLSTGQTRSRESTTSRTTSSLRRETTPTSSTTTRTPSFRRSSPTTHPSGETSERQSFRPRKGFSNLLAWLKRVLRRPLPESG

SEQ ID NO: 188 - DNA, 318 bp, Artificial Sequence
  synthetic sequence
ctggcagtcgtggtcttgtgctgcctggttataggtatctcggacccggaaacgggctcgatcgaggagagcctgtcaacagggcagacgaggtcgcgcgagagcacgacatctcgtacaacgagcagcttgaggcgggagacaacccctacctcaagtacaaccacgcggacgccgagtttcaggagaagctcgccgacgacacatccttcgggggaaacctcggaaaggcagtctttcaggccaagaaaagggttctcgaaccttttggcctggttgaagagggtgctaagacggcccctaccggaaagcggatag

SEQ ID NO: 189 - protein, 724 aa, Artificial Sequence
  synthetic sequence
MSFVDHPPDWLEEVGEGLREFLGLEAGPPKPKPNDQHQDQARGLVLPGYNYLGPGNGLDRGEPVNRADEVAREHDISYNEQLEAGDNPYLKYNHADAEFQEKLADDTSFGGNLGKAVFQAKKRVLEPFGLVEEGAKTAPTGKRIDDHFPKRKKARTEEDSKPSTSSDAEAGPSGSQQLQIPAQPASSLGADTMSAGGGGPLGDNNQGADGVGNASGDWHCDSTWMGDRVVTKSTRTWVLPSYNNHQYREIKSGSVDGSNANAYFGYSTPWGYFDFNRFHSHWSPRDWQRLINNYWGFRPRSLRVKIFNIQVKEVTVQDSTTTIANNLTSTVQVFTDDDYQLPYVVGNGTEGCLPAFPPQVFTLPQYGYATLNRDNTENPTERSSFFCLEYFPSKMLRTGNNFEFTYNFEEVPFHSSFAPSQNLFKLANPLVDQYLYRFVSTNNTGGVQFNKNLAGRYANTYKNWFPGPMGRTQGWNLGSGVNRASVSAFATTNRMELEGASYQVPPQPNGMTNNLQGSNTYALENTMIFNSQPANPGTTATYLEGNMLITSESETQPVNRVAYNVGGQMATNNQSSTTAPATGTYNLQEIVPGSVWMERDVYLQGPIWAKIPETGAHFHPSPAMGGFGLKHPPPMMLIKNTPVPGNITSFSDVPVSSFITQYSTGQVTVEMEWELKKENSKRWNPEIQYTNNYNDPQFVDFAPDSTGEYRTTRPIGTRYLTRPL

SEQ ID NO: 190 - DNA, 2175 bp, Artificial Sequence
  synthetic sequence
atgtcttttgttgatcaccctccagattggttggaagaagttggtgaaggtcttcgcgagtttttgggccttgaagcgggcccaccgaaaccaaaacccaatgatcagcatcaagatcaagcccgtggtcttgtgctgcctggttataactatctcggacccggaaacgggctcgatcgaggagagcctgtcaacagggcagacgaggtcgcgcgagagcacgacatctcgtacaacgagcagcttgaggcgggagacaacccctacctcaagtacaaccacgcggacgccgagtttcaggagaagctcgccgacgacacatccttcgggggaaacctcggaaaggcagtctttcaggccaagaaaagggttctcgaaccttttggcctggttgaagagggtgctaagacggcccctaccggaaagcggatagacgaccactttccaaaaagaaagaaggctcggaccgaagaggactccaagccttccacctcgtcagacgccgaagctggacccagcggatcccagcagctgcaaatcccagcccaaccagcctcaagtttgggagctgatacaatgtctgcgggaggtggcggcccattgggcgacaataaccaaggtgccgatggagtgggcaatgcctcgggagattggcattgcgattccacgtggatgggggacagagtcgtcaccaagtccacccgaacctgggtgctgcccagctacaacaaccaccagtaccgagagatcaaaagcggctccgtcgacggaagcaacgccaacgcctactttggatacagcaccccctgggggtactttgactttaaccgcttccacagccactggagcccccgagactggcaaagactcatcaacaactactggggcttcagaccccggtccctcagagtcaaaatcttcaacattcaagtcaaagaggtcacggtgcaggactccaccaccaccatcgccaacaacctcacctccaccgtccaagtgtttacggacgacgactaccagctgccctacgtcgtcggcaacgggaccgagggatgcctgccggccttccctccgcaggtctttacgctgccgcagtacggttacgcgacgctgaaccgcgacaacacagaaaatcccaccgagaggagcagcttcttctgcctagagtactttcccagcaagatgctgagaacgggcaacaactttgagtttacctacaactttgaggaggtgcccttccactccagcttcgctcccagtcagaacctgttcaagctggccaacccgctggtggaccagtacttgtaccgcttcgtgagcacaaataacactggcggagtccagttcaacaagaacctggccgggagatacgccaacacctacaaaaactggttcccggggcccatgggccgaacccagggctggaacctgggctccggggtcaaccgcgccagtgtcagcgccttcgccacgaccaataggatggagctcgagggcgcgagttaccaggtgcccccgcagccgaacggcatgaccaacaacctccagggcagcaacacctatgccctggagaacactatgatcttcaacagccagccggcgaacccgggcaccaccgccacgtacctcgagggcaacatgctcatcaccagcgagagcgagacacagccggtgaaccgcgtggcgtacaacgtcggcgggcagatggccaccaacaaccagagctccaccactgcccccgcgaccggcacgtacaacctccaggaaatcgtgcccggcagcgtgtggatggagagggacgtgtacctccaaggacccatctgggccaagatcccagagacaggggcgcactttcacccctctccggccatgggcggattcggactcaaacacccaccgcccatgatgctcatcaagaacacgcctgtgcccggaaatatcaccagcttctcggacgtgcccgtcagcagcttcatcacccagtacagcaccgggcaggtcaccgtggagatggagtgggagctcaagaaggaaaactccaagaggtggaacccagagatccagtacacaaacaactacaacgacccccagtttgtggactttgccccggacagcaccggggaatacagaaccaccagacctatcggaacccgataccttacccgacccctttaa

SEQ ID NO: 191 - protein, 110 aa, Artificial Sequence
  synthetic sequence
MISIKIKPVVLCCLVITISDPETGSIEESLSTGQTRSRESTTSRTTSSLRRETTPTSSTTTRTPSFRRSSPTTHPSGETSERQSFRPRKGFSNLLAWLKRVLRRPLPESG

SEQ ID NO: 192 - DNA, 333 bp, Artificial Sequence
  synthetic sequence
atgatcagcatcaagatcaagcccgtggtcttgtgctgcctggttataactatctcggacccggaaacgggctcgatcgaggagagcctgtcaacagggcagacgaggtcgcgcgagagcacgacatctcgtacaacgagcagcttgaggcgggagacaacccctacctcaagtacaaccacgcggacgccgagtttcaggagaagctcgccgacgacacatccttcgggggaaacctcggaaaggcagtctttcaggccaagaaaagggttctcgaaccttttggcctggttgaagagggtgctaagacggcccctaccggaaagcggatag

SEQ ID NO: 193 - protein, 724 aa, Artificial Sequence
  synthetic sequence
MSFVDHPPDWLEEVGEGLREFLGLEAGPPKPKPNQQHQDQARGLVLPGYNYLGPGNGLDRGEPVNRADEVAREHDKSYDEQLEAGDNPYLKYNHADAEFQEKLADDTSFGGNLGKAVFQAKKRVLEPFGLVEEGAKTAPTGKRIDDHFPKRKKARTEEDSKPSTSSDAEAGPSGSQQLQIPAQPASSLGADTMSAGGGGPLGDNNQGADGVGNASGDWHCDSTWMGDRVVTKSTRTWVLPSYNNHQYREIKSGSVDGSNANAYFGYSTPWGYFDFNRFHSHWSPRDWQRLINNYWGFRPRSLRVKIFNIQVKEVTVQDSTTTIANNLTSTVQVFTDDDYQLPYVVGNGTEGCLPAFPPQVFTLPQYGYATLNRDNTENPTERSSFFCLEYFPSKMLRTGNNFEFTYNFEEVPFHSSFAPSQNLFKLANPLVDQYLYRFVSTNNTGGVQFNKNLAGRYANTYKNWFPGPMGRTQGWNLGSGVNRASVSAFATTNRMELEGASYQVPPQPNGMTNNLQGSNTYALENTMIFNSQPANPGTTATYLEGNMLITSESETQPVNRVAYNVGGQMATNNQSSTTAPATGTYNLQEIVPGSVWMERDVYLQGPIWAKIPETGAHFHPSPAMGGFGLKHPPPMMLIKNTPVPGNITSFSDVPVSSFITQYSTGQVTVEMEWELKKENSKRWNPEIQYTNNYNDPQFVDFAPDSTGEYRTTRPIGTRYLTRPL

SEQ ID NO: 194 - DNA, 2175 bp, Artificial Sequence
  synthetic sequence
atgtcttttgttgatcaccctccagattggttggaagaagttggtgaaggtcttcgcgagtttttgggccttgaagcgggcccaccgaaaccaaaacccaatcagcagcatcaagatcaagcccgtggtcttgtgctgcctggttataactatctcggacccggaaacgggctcgatcgaggagagcctgtcaacagggcagacgaggtcgcgcgagagcacgacaagtcgtacgatgagcagcttgaggcgggagacaacccctacctcaagtacaaccacgcggacgccgagtttcaggagaagctcgccgacgacacatccttcgggggaaacctcggaaaggcagtctttcaggccaagaaaagggttctcgaaccttttggcctggttgaagagggtgctaagacggcccctaccggaaagcggatagacgaccactttccaaaaagaaagaaggctcggaccgaagaggactccaagccttccacctcgtcagacgccgaagctggacccagcggatcccagcagctgcaaatcccagcccaaccagcctcaagtttgggagctgatacaatgtctgcgggaggtggcggcccattgggcgacaataaccaaggtgccgatggagtgggcaatgcctcgggagattggcattgcgattccacgtggatgggggacagagtcgtcaccaagtccacccgaacctgggtgctgcccagctacaacaaccaccagtaccgagagatcaaaagcggctccgtcgacggaagcaacgccaacgcctactttggatacagcaccccctgggggtactttgactttaaccgcttccacagccactggagcccccgagactggcaaagactcatcaacaactactggggcttcagaccccggtccctcagagtcaaaatcttcaacattcaagtcaaagaggtcacggtgcaggactccaccaccaccatcgccaacaacctcacctccaccgtccaagtgtttacggacgacgactaccagctgccctacgtcgtcggcaacgggaccgagggatgcctgccggccttccctccgcaggtctttacgctgccgcagtacggttacgcgacgctgaaccgcgacaacacagaaaatcccaccgagaggagcagcttcttctgcctagagtactttcccagcaagatgctgagaacgggcaacaactttgagtttacctacaactttgaggaggtgcccttccactccagcttcgctcccagtcagaacctgttcaagctggccaacccgctggtggaccagtacttgtaccgcttcgtgagcacaaataacactggcggagtccagttcaacaagaacctggccgggagatacgccaacacctacaaaaactggttcccggggcccatgggccgaacccagggctggaacctgggctccggggtcaaccgcgccagtgtcagcgccttcgccacgaccaataggatggagctcgagggcgcgagttaccaggtgcccccgcagccgaacggcatgaccaacaacctccagggcagcaacacctatgccctggagaacactatgatcttcaacagccagccggcgaacccgggcaccaccgccacgtacctcgagggcaacatgctcatcaccagcgagagcgagacacagccggtgaaccgcgtggcgtacaacgtcggcgggcagatggccaccaacaaccagagctccaccactgcccccgcgaccggcacgtacaacctccaggaaatcgtgcccggcagcgtgtggatggagagggacgtgtacctccaaggacccatctgggccaagatcccagagacaggggcgcactttcacccctctccggccatgggcggattcggactcaaacacccaccgcccatgatgctcatcaagaacacgcctgtgcccggaaatatcaccagcttctcggacgtgcccgtcagcagcttcatcacccagtacagcaccgggcaggtcaccgtggagatggagtgggagctcaagaaggaaaactccaagaggtggaacccagagatccagtacacaaacaactacaacgacccccagtttgtggactttgccccggacagcaccggggaatacagaaccaccagacctatcggaacccgataccttacccgacccctttaa

SEQ ID NO: 195 - protein, 65 aa, Artificial Sequence; identical to SEQ ID NO: 115
  synthetic sequence

SEQ ID NO: 196 - DNA, 198 bp, Artificial Sequence; identical to SEQ ID NO: 116
  synthetic sequence

SEQ ID NO: 197 - protein, 724 aa, Artificial Sequence
  synthetic sequence
MSFVDHPPDWLEEVGEGLREFHGLEAGPPKPKPNQQHQDQARGLVLPGYNYLGPGNGLDRGEPVNRADEVAREHDISYNEQLEAGDNPYLKYNHADAEFQEKLADDTSFGGNLGKAVFQAKKRVLEPFGLVEEGAKTAPTGKRIDDHFPKRKKARTEEDSKPSTSSDAEAGPSGSQQLQIPAQPASSLGADTMSAGGGGPLGDNNQGADGVGNASGDWHCDSTWMGDRVVTKSTRTWVLPSYNNHQYREIKSGSVDGSNANAYFGYSTPWGYFDFNRFHSHWSPRDWQRLINNYWGFRPRSLRVKIFNIQVKEVTVQDSTTTIANNLTSTVQVFTDDDYQLPYVVGNGTEGCLPAFPPQVFTLPQYGYATLNRDNTENPTERSSFFCLEYFPSKMLRTGNNFEFTYNFEEVPFHSSFAPSQNLFKLANPLVDQYLYRFVSTNNTGGVQFNKNLAGRYANTYKNWFPGPMGRTQGWNLGSGVNRASVSAFATTNRMELEGASYQVPPQPNGMTNNLQGSNTYALENTMIFNSQPANPGTTATYLEGNMLITSESETQPVNRVAYNVGGQMATNNQSSTTAPATGTYNLQEIVPGSVWMERDVYLQGPIWAKIPETGAHFHPSPAMGGFGLKHPPPMMLIKNTPVPGNITSFSDVPVSSFITQYSTGQVTVEMEWELKKENSKRWNPEIQYTNNYNDPQFVDFAPDSTGEYRTTRPIGTRYLTRPL

SEQ ID NO: 198 - DNA, 2175 bp, Artificial Sequence
  synthetic sequence
atgtcttttgttgatcaccctccagattggttggaagaagttggtgaaggccttcgcgagtttcatggccttgaagcgggcccaccgaaaccaaaacccaatcagcagcatcaagatcaagcccgtggtcttgtgctgcctggttataactatctcggacccggaaacgggctcgatcgaggagagcctgtcaacagggcagacgaggtcgcgcgagagcacgacatctcgtacaacgagcagcttgaggcgggagacaacccctacctcaagtacaaccacgcggacgccgagtttcaggagaagctcgccgacgacacatccttcgggggaaacctcggaaaggcagtctttcaggccaagaaaagggttctcgaaccttttggcctggttgaagagggtgctaagacggcccctaccggaaagcggatagacgaccactttccaaaaagaaagaaggctcggaccgaagaggactccaagccttccacctcgtcagacgccgaagctggacccagcggatcccagcagctgcaaatcccagcccaaccagcctcaagtttgggagctgatacaatgtctgcgggaggtggcggcccattgggcgacaataaccaaggtgccgatggagtgggcaatgcctcgggagattggcattgcgattccacgtggatgggggacagagtcgtcaccaagtccacccgaacctgggtgctgcccagctacaacaaccaccagtaccgagagatcaaaagcggctccgtcgacggaagcaacgccaacgcctactttggatacagcaccccctgggggtactttgactttaaccgcttccacagccactggagcccccgagactggcaaagactcatcaacaactactggggcttcagaccccggtccctcagagtcaaaatcttcaacattcaagtcaaagaggtcacggtgcaggactccaccaccaccatcgccaacaacctcacctccaccgtccaagtgtttacggacgacgactaccagctgccctacgtcgtcggcaacgggaccgagggatgcctgccggccttccctccgcaggtctttacgctgccgcagtacggttacgcgacgctgaaccgcgacaacacagaaaatcccaccgagaggagcagcttcttctgcctagagtactttcccagcaagatgctgagaacgggcaacaactttgagtttacctacaactttgaggaggtgcccttccactccagcttcgctcccagtcagaacctgttcaagctggccaacccgctggtggaccagtacttgtaccgcttcgtgagcacaaataacactggcggagtccagttcaacaagaacctggccgggagatacgccaacacctacaaaaactggttcccggggcccatgggccgaacccagggctggaacctgggctccggggtcaaccgcgccagtgtcagcgccttcgccacgaccaataggatggagctcgagggcgcgagttaccaggtgcccccgcagccgaacggcatgaccaacaacctccagggcagcaacacctatgccctggagaacactatgatcttcaacagccagccggcgaacccgggcaccaccgccacgtacctcgagggcaacatgctcatcaccagcgagagcgagacacagccggtgaaccgcgtggcgtacaacgtcggcgggcagatggccaccaacaaccagagctccaccactgcccccgcgaccggcacgtacaacctccaggaaatcgtgcccggcagcgtgtggatggagagggacgtgtacctccaaggacccatctgggccaagatcccagagacaggggcgcactttcacccctctccggccatgggcggattcggactcaaacacccaccgcccatgatgctcatcaagaacacgcctgtgcccggaaatatcaccagcttctcggacgtgcccgtcagcagcttcatcacccagtacagcaccgggcaggtcaccgtggagatggagtgggagctcaagaaggaaaactccaagaggtggaacccagagatccagtacacaaacaactacaacgacccccagtttgtggactttgccccggacagcaccggggaatacagaaccaccagacctatcggaacccgataccttacccgacccctttaa

SEQ ID NO: 199 - protein, 122 aa, Artificial Sequence; identical to SEQ ID NO: 151
  synthetic sequence

SEQ ID NO: 200 - DNA, 369 bp, Artificial Sequence; identical to SEQ ID NO: 152
  synthetic sequence

SEQ ID NO: 201 - protein, 724 aa, Artificial Sequence
  synthetic sequence
MSFVDHPPDWLETLGEGLREFWGLKPGPPKPKPAEQHQDQARGLVLPGYNYLGPGNGLDRGEPVNRADEVAREHDISYNEQLEAGDNPYLKYNHADAEFQEKLADDTSFGGNLGKAVFQAKKRVLEPFGLVEEGAKTAPTGKRIDDHFPKRKKARTEEDSKPSTSSDAEAGPSGSQQLQIPAQPASSLGADTMSAGGGGPLGDNNQGADGVGNASGDWHCDSTWMGDRVVTKSTRTWVLPSYNNHQYREIKSGSVDGSNANAYFGYSTPWGYFDFNRFHSHWSPRDWQRLINNYWGFRPRSLRVKIFNIQVKEVTVQDSTTTIANNLTSTVQVFTDDDYQLPYVVGNGTEGCLPAFPPQVFTLPQYGYATLNRDNTENPTERSSFFCLEYFPSKMLRTGNNFEFTYNFEEVPFHSSFAPSQNLFKLANPLVDQYLYRFVSTNNTGGVQFNKNLAGRYANTYKNWFPGPMGRTQGWNLGSGVNRASVSAFATTNRMELEGASYQVPPQPNGMTNNLQGSNTYALENTMIFNSQPANPGTTATYLEGNMLITSESETQPVNRVAYNVGGQMATNNQSSTTAPATGTYNLQEIVPGSVWMERDVYLQGPIWAKIPETGAHFHPSPAMGGFGLKHPPPMMLIKNTPVPGNITSFSDVPVSSFITQYSTGQVTVEMEWELKKENSKRWNPEIQYTNNYNDPQFVDFAPDSTGEYRTTRPIGTRYLTRPL

SEQ ID NO: 202 - DNA, 2175 bp, Artificial Sequence
  synthetic sequence
atgtcttttgttgatcaccctccagattggttggaaacgctcggtgaaggtctacgcgagttttggggccttaaacctggcccaccgaaaccaaaacccgctgagcagcatcaagatcaagcccgtggtcttgtgctgcctggttataactatctcggacccggaaacgggctcgatcgaggagagcctgtcaacagggcagacgaggtcgcgcgagagcacgacatctcgtacaacgagcagcttgaggcgggagacaacccctacctcaagtacaaccacgcggacgccgagtttcaggagaagctcgccgacgacacatccttcgggggaaacctcggaaaggcagtctttcaggccaagaaaagggttctcgaaccttttggcctggttgaagagggtgctaagacggcccctaccggaaagcggatagacgaccactttccaaaaagaaagaaggctcggaccgaagaggactccaagccttccacctcgtcagacgccgaagctggacccagcggatcccagcagctgcaaatcccagcccaaccagcctcaagtttgggagctgatacaatgtctgcgggaggtggcggcccattgggcgacaataaccaaggtgccgatggagtgggcaatgcctcgggagattggcattgcgattccacgtggatgggggacagagtcgtcaccaagtccacccgaacctgggtgctgcccagctacaacaaccaccagtaccgagagatcaaaagcggctccgtcgacggaagcaacgccaacgcctactttggatacagcaccccctgggggtactttgactttaaccgcttccacagccactggagcccccgagactggcaaagactcatcaacaactactggggcttcagaccccggtccctcagagtcaaaatcttcaacattcaagtcaaagaggtcacggtgcaggactccaccaccaccatcgccaacaacctcacctccaccgtccaagtgtttacggacgacgactaccagctgccctacgtcgtcggcaacgggaccgagggatgcctgccggccttccctccgcaggtctttacgctgccgcagtacggttacgcgacgctgaaccgcgacaacacagaaaatcccaccgagaggagcagcttcttctgcctagagtactttcccagcaagatgctgagaacgggcaacaactttgagtttacctacaactttgaggaggtgcccttccactccagcttcgctcccagtcagaacctgttcaagctggccaacccgctggtggaccagtacttgtaccgcttcgtgagcacaaataacactggcggagtccagttcaacaagaacctggccgggagatacgccaacacctacaaaaactggttcccggggcccatgggccgaacccagggctggaacctgggctccggggtcaaccgcgccagtgtcagcgccttcgccacgaccaataggatggagctcgagggcgcgagttaccaggtgcccccgcagccgaacggcatgaccaacaacctccagggcagcaacacctatgccctggagaacactatgatcttcaacagccagccggcgaacccgggcaccaccgccacgtacctcgagggcaacatgctcatcaccagcgagagcgagacacagccggtgaaccgcgtggcgtacaacgtcggcgggcagatggccaccaacaaccagagctccaccactgcccccgcgaccggcacgtacaacctccaggaaatcgtgcccggcagcgtgtggatggagagggacgtgtacctccaaggacccatctgggccaagatcccagagacaggggcgcactttcacccctctccggccatgggcggattcggactcaaacacccaccgcccatgatgctcatcaagaacacgcctgtgcccggaaatatcaccagcttctcggacgtgcccgtcagcagcttcatcacccagtacagcaccgggcaggtcaccgtggagatggagtgggagctcaagaaggaaaactccaagaggtggaacccagagatccagtacacaaacaactacaacgacccccagtttgtggactttgccccggacagcaccggggaatacagaaccaccagacctatcggaacccgataccttacccgacccctttaa

SEQ ID NO: 203 - protein, 118 aa, Artificial Sequence
  synthetic sequence
LAHRNQNPLSSIKIKPVVLCCLVITISDPETGSIEESLSTGQTRSRESTTSRTTSSLRRETTPTSSTTTRTPSFRRSSPTTHPSGETSERQSFRPRKGFSNLLAWLKRVLRRPLPESG

SEQ ID NO: 204 - DNA, 357 bp, Artificial Sequence
  synthetic sequence
ctggcccaccgaaaccaaaacccgctgagcagcatcaagatcaagcccgtggtcttgtgctgcctggttataactatctcggacccggaaacgggctcgatcgaggagagcctgtcaacagggcagacgaggtcgcgcgagagcacgacatctcgtacaacgagcagcttgaggcgggagacaacccctacctcaagtacaaccacgcggacgccgagtttcaggagaagctcgccgacgacacatccttcgggggaaacctcggaaaggcagtctttcaggccaagaaaagggttctcgaaccttttggcctggttgaagagggtgctaagacggcccctaccggaaagcggatag

SEQ ID NO: 205 - protein, 724 aa, Artificial Sequence
  synthetic sequence
MSFVDHPPDWLEEVGEGLREFLGLEAGPPKPKPNQQHDDQARGLVLPGYNYLGPGNGLDRGEPVNRADEVAREHDISYNEQLEAGDNPYLKYNHADAEFQEKLADDTSFGGNLGKAVFQAKKRVLEPFGLVEEGAKTAPTGKRIDDHFPKRKKARTEEDSKPSTSSDAEAGPSGSQQLQIPAQPASSLGADTMSAGGGGPLGDNNQGADGVGNASGDWHCDSTWMGDRVVTKSTRTWVLPSYNNHQYREIKSGSVDGSNANAYFGYSTPWGYFDFNRFHSHWSPRDWQRLINNYWGFRPRSLRVKIFNIQVKEVTVQDSTTTIANNLTSTVQVFTDDDYQLPYVVGNGTEGCLPAFPPQVFTLPQYGYATLNRDNTENPTERSSFFCLEYFPSKMLRTGNNFEFTYNFEEVPFHSSFAPSQNLFKLANPLVDQYLYRFVSTNNTGGVQFNKNLAGRYANTYKNWFPGPMGRTQGWNLGSGVNRASVSAFATTNRMELEGASYQVPPQPNGMTNNLQGSNTYALENTMIFNSQPANPGTTATYLEGNMLITSESETQPVNRVAYNVGGQMATNNQSSTTAPATGTYNLQEIVPGSVWMERDVYLQGPIWAKIPETGAHFHPSPAMGGFGLKHPPPMMLIKNTPVPGNITSFSDVPVSSFITQYSTGQVTVEMEWELKKENSKRWNPEIQYTNNYNDPQFVDFAPDSTGEYRTTRPIGTRYLTRPL

SEQ ID NO: 206 - DNA, 2175 bp, Artificial Sequence
  synthetic sequence
atgtcttttgttgatcaccctccagattggttggaagaagttggtgaaggtcttcgcgagtttttgggccttgaagcgggcccaccgaaaccaaaacccaatcagcagcatgacgatcaagcccgtggtcttgtgctgcctggttataactatctcggacccggaaacgggctcgatcgaggagagcctgtcaacagggcagacgaggtcgcgcgagagcacgacatctcgtacaacgagcagcttgaggcgggagacaacccctacctcaagtacaaccacgcggacgccgagtttcaggagaagctcgccgacgacacatccttcgggggaaacctcggaaaggcagtctttcaggccaagaaaagggttctcgaaccttttggcctggttgaagagggtgctaagacggcccctaccggaaagcggatagacgaccactttccaaaaagaaagaaggctcggaccgaagaggactccaagccttccacctcgtcagacgccgaagctggacccagcggatcccagcagctgcaaatcccagcccaaccagcctcaagtttgggagctgatacaatgtctgcgggaggtggcggcccattgggcgacaataaccaaggtgccgatggagtgggcaatgcctcgggagattggcattgcgattccacgtggatgggggacagagtcgtcaccaagtccacccgaacctgggtgctgcccagctacaacaaccaccagtaccgagagatcaaaagcggctccgtcgacggaagcaacgccaacgcctactttggatacagcaccccctgggggtactttgactttaaccgcttccacagccactggagcccccgagactggcaaagactcatcaacaactactggggcttcagaccccggtccctcagagtcaaaatcttcaacattcaagtcaaagaggtcacggtgcaggactccaccaccaccatcgccaacaacctcacctccaccgtccaagtgtttacggacgacgactaccagctgccctacgtcgtcggcaacgggaccgagggatgcctgccggccttccctccgcaggtctttacgctgccgcagtacggttacgcgacgctgaaccgcgacaacacagaaaatcccaccgagaggagcagcttcttctgcctagagtactttcccagcaagatgctgagaacgggcaacaactttgagtttacctacaactttgaggaggtgcccttccactccagcttcgctcccagtcagaacctgttcaagctggccaacccgctggtggaccagtacttgtaccgcttcgtgagcacaaataacactggcggagtccagttcaacaagaacctggccgggagatacgccaacacctacaaaaactggttcccggggcccatgggccgaacccagggctggaacctgggctccggggtcaaccgcgccagtgtcagcgccttcgccacgaccaataggatggagctcgagggcgcgagttaccaggtgcccccgcagccgaacggcatgaccaacaacctccagggcagcaacacctatgccctggagaacactatgatcttcaacagccagccggcgaacccgggcaccaccgccacgtacctcgagggcaacatgctcatcaccagcgagagcgagacacagccggtgaaccgcgtggcgtacaacgtcggcgggcagatggccaccaacaaccagagctccaccactgcccccgcgaccggcacgtacaacctccaggaaatcgtgcccggcagcgtgtggatggagagggacgtgtacctccaaggacccatctgggccaagatcccagagacaggggcgcactttcacccctctccggccatgggcggattcggactcaaacacccaccgcccatgatgctcatcaagaacacgcctgtgcccggaaatatcaccagcttctcggacgtgcccgtcagcagcttcatcacccagtacagcaccgggcaggtcaccgtggagatggagtgggagctcaagaaggaaaactccaagaggtggaacccagagatccagtacacaaacaactacaacgacccccagtttgtggactttgccccggacagcaccggggaatacagaaccaccagacctatcggaacccgataccttacccgacccctttaa

SEQ ID NO: 207 - protein, 107 aa, Artificial Sequence
  synthetic sequence
MTIKPVVLCCLVITISDPETGSIEESLSTGQTRSRESTTSRTTSSLRRETTPTSSTTTRTPSFRRSSPTTHPSGETSERQSFRPRKGFSNLLAWLKRVLRRPLPESG

SEQ ID NO: 208 - DNA, 324 bp, Artificial Sequence
  synthetic sequence
atgacgatcaagcccgtggtcttgtgctgcctggttataactatctcggacccggaaacgggctcgatcgaggagagcctgtcaacagggcagacgaggtcgcgcgagagcacgacatctcgtacaacgagcagcttgaggcgggagacaacccctacctcaagtacaaccacgcggacgccgagtttcaggagaagctcgccgacgacacatccttcgggggaaacctcggaaaggcagtctttcaggccaagaaaagggttctcgaaccttttggcctggttgaagagggtgctaagacggcccctaccggaaagcggatag

SEQ ID NO: 209 - protein, 724 aa, Artificial Sequence
  synthetic sequence
MSFVDGPPDWLEEVGEGLREFLGLEAGPPKPKPNQQHQDQARGLVLPGYNYLGPGNGLDRGEPVNRADEVAREHDISYNEQLEAGDNPYLKYNHADAEFQEKLADDTSFGGNLGKAVFQAKKRVLEPFGLVEEGAKTAPTGKRIDDHFPKRKKARTEEDSKPSTSSDAEAGPSGSQQLQIPAQPASSLGADTMSAGGGGPLGDNNQGADGVGNASGDWHCDSTWMGDRVVTKSTRTWVLPSYNNHQYREIKSGSVDGSNANAYFGYSTPWGYFDFNRFHSHWSPRDWQRLINNYWGFRPRSLRVKIFNIQVKEVTVQDSTTTIANNLTSTVQVFTDDDYQLPYVVGNGTEGCLPAFPPQVFTLPQYGYATLNRDNTENPTERSSFFCLEYFPSKMLRTGNNFEFTYNFEEVPFHSSFAPSQNLFKLANPLVDQYLYRFVSTNNTGGVQFNKNLAGRYANTYKNWFPGPMGRTQGWNLGSGVNRASVSAFATTNRMELEGASYQVPPQPNGMTNNLQGSNTYALENTMIFNSQPANPGTTATYLEGNMLITSESETQPVNRVAYNVGGQMATNNQSSTTAPATGTYNLQEIVPGSVWMERDVYLQGPIWAKIPETGAHFHPSPAMGGFGLKHPPPMMLIKNTPVPGNITSFSDVPVSSFITQYSTGQVTVEMEWELKKENSKRWNPEIQYTNNYNDPQFVDFAPDSTGEYRTTRPIGTRYLTRPL

SEQ ID NO: 210 - DNA, 2175 bp, Artificial Sequence
  synthetic sequence
atgtcttttgttgatggacctccagattggttggaagaagttggtgaaggtctgcgcgagtttttgggccttgaagcgggcccaccgaaaccaaaacccaatcagcagcatcaagatcaagcccgtggtcttgtgctgcctggttataactatctcggacccggaaacgggctcgatcgaggagagcctgtcaacagggcagacgaggtcgcgcgagagcacgacatctcgtacaacgagcagcttgaggcgggagacaacccctacctcaagtacaaccacgcggacgccgagtttcaggagaagctcgccgacgacacatccttcgggggaaacctcggaaaggcagtctttcaggccaagaaaagggttctcgaaccttttggcctggttgaagagggtgctaagacggcccctaccggaaagcggatagacgaccactttccaaaaagaaagaaggctcggaccgaagaggactccaagccttccacctcgtcagacgccgaagctggacccagcggatcccagcagctgcaaatcccagcccaaccagcctcaagtttgggagctgatacaatgtctgcgggaggtggcggcccattgggcgacaataaccaaggtgccgatggagtgggcaatgcctcgggagattggcattgcgattccacgtggatgggggacagagtcgtcaccaagtccacccgaacctgggtgctgcccagctacaacaaccaccagtaccgagagatcaaaagcggctccgtcgacggaagcaacgccaacgcctactttggatacagcaccccctgggggtactttgactttaaccgcttccacagccactggagcccccgagactggcaaagactcatcaacaactactggggcttcagaccccggtccctcagagtcaaaatcttcaacattcaagtcaaagaggtcacggtgcaggactccaccaccaccatcgccaacaacctcacctccaccgtccaagtgtttacggacgacgactaccagctgccctacgtcgtcggcaacgggaccgagggatgcctgccggccttccctccgcaggtctttacgctgccgcagtacggttacgcgacgctgaaccgcgacaacacagaaaatcccaccgagaggagcagcttcttctgcctagagtactttcccagcaagatgctgagaacgggcaacaactttgagtttacctacaactttgaggaggtgcccttccactccagcttcgctcccagtcagaacctgttcaagctggccaacccgctggtggaccagtacttgtaccgcttcgtgagcacaaataacactggcggagtccagttcaacaagaacctggccgggagatacgccaacacctacaaaaactggttcccggggcccatgggccgaacccagggctggaacctgggctccggggtcaaccgcgccagtgtcagcgccttcgccacgaccaataggatggagctcgagggcgcgagttaccaggtgcccccgcagccgaacggcatgaccaacaacctccagggcagcaacacctatgccctggagaacactatgatcttcaacagccagccggcgaacccgggcaccaccgccacgtacctcgagggcaacatgctcatcaccagcgagagcgagacacagccggtgaaccgcgtggcgtacaacgtcggcgggcagatggccaccaacaaccagagctccaccactgcccccgcgaccggcacgtacaacctccaggaaatcgtgcccggcagcgtgtggatggagagggacgtgtacctccaaggacccatctgggccaagatcccagagacaggggcgcactttcacccctctccggccatgggcggattcggactcaaacacccaccgcccatgatgctcatcaagaacacgcctgtgcccggaaatatcaccagcttctcggacgtgcccgtcagcagcttcatcacccagtacagcaccgggcaggtcaccgtggagatggagtgggagctcaagaaggaaaactccaagaggtggaacccagagatccagtacacaaacaactacaacgacccccagtttgtggactttgccccggacagcaccggggaatacagaaccaccagacctatcggaacccgataccttacccgacccctttaa

SEQ ID NO: 211 - protein, 139 aa, Artificial Sequence
  synthetic sequence
MDLQIGWKKLVKVCASFWALKRAHRNQNPISSIKIKPVVLCCLVITISDPETGSIEESLSTGQTRSRESTTSRTTSSLRRETTPTSSTTTRTPSFRRSSPTTHPSGETSERQSFRPRKGFSNLLAWLKRVLRRPLPESG

SEQ ID NO: 212 - DNA, 420 bp, Artificial Sequence
  synthetic sequence
atggacctccagattggttggaagaagttggtgaaggtctgcgcgagtttttgggccttgaagcgggcccaccgaaaccaaaacccaatcagcagcatcaagatcaagcccgtggtcttgtgctgcctggttataactatctcggacccggaaacgggctcgatcgaggagagcctgtcaacagggcagacgaggtcgcgcgagagcacgacatctcgtacaacgagcagcttgaggcgggagacaacccctacctcaagtacaaccacgcggacgccgagtttcaggagaagctcgccgacgacacatccttcgggggaaacctcggaaaggcagtctttcaggccaagaaaagggttctcgaaccttttggcctggttgaagagggtgctaagacggcccctaccggaaagcggatag

SEQ ID NO: 213 - protein, 724 aa, Artificial Sequence
  synthetic sequence
MSFVDHPPDWLEEVGEGLREFLGLEAGPPKPKPAQRHKDDSRGLVLPGYRYLGPFNGLDKGEPVNEADEVAREHDISYNEQLEAGDNPYLKYNHADAEFQEKLADDTSFGGNLGKAVFQAKKRVLEPFGLVEEGAKTAPTGKRIDDHFPKRKKARTEEDSKPSTSSDAEAGPSGSQQLQIPAQPASSLGADTMSAGGGGPLGDNNQGADGVGNASGDWHCDSTWMGDRVVTKSTRTWVLPSYNNHQYREIKSGSVDGSNANAYFGYSTPWGYFDFNRFHSHWSPRDWQRLINNYWGFRPRSLRVKIFNIQVKEVTVQDSTTTIANNLTSTVQVFTDDDYQLPYVVGNGTEGCLPAFPPQVFTLPQYGYATLNRDNTENPTERSSFFCLEYFPSKMLRTGNNFEFTYNFEEVPFHSSFAPSQNLFKLANPLVDQYLYRFVSTNNTGGVQFNKNLAGRYANTYKNWFPGPMGRTQGWNLGSGVNRASVSAFATTNRMELEGASYQVPPQPNGMTNNLQGSNTYALENTMIFNSQPANPGTTATYLEGNMLITSESETQPVNRVAYNVGGQMATNNQSSTTAPATGTYNLQEIVPGSVWMERDVYLQGPIWAKIPETGAHFHPSPAMGGFGLKHPPPMMLIKNTPVPGNITSFSDVPVSSFITQYSTGQVTVEMEWELKKENSKRWNPEIQYTNNYNDPQFVDFAPDSTGEYRTTRPIGTRYLTRPL

SEQ ID NO: 214 - DNA, 2175 bp, Artificial Sequence
  synthetic sequence
atgtcttttgttgatcaccctccagattggttggaagaagttggtgaaggtcttcgcgagtttttgggccttgaagcgggcccaccgaaaccaaaacccgctcagcgccataaggatgatagtcgtggtcttgtgctgcctggttatcgctatctcggacccttcaacgggctcgataagggagagcctgtcaacgaggcagacgaggtcgcgcgagagcacgacatctcgtacaacgagcagcttgaggcgggagacaacccctacctcaagtacaaccacgcggacgccgagtttcaggagaagctcgccgacgacacatccttcgggggaaacctcggaaaggcagtctttcaggccaagaaaagggttctcgaaccttttggcctggttgaagagggtgctaagacggcccctaccggaaagcggatagacgaccactttccaaaaagaaagaaggctcggaccgaagaggactccaagccttccacctcgtcagacgccgaagctggacccagcggatcccagcagctgcaaatcccagcccaaccagcctcaagtttgggagctgatacaatgtctgcgggaggtggcggcccattgggcgacaataaccaaggtgccgatggagtgggcaatgcctcgggagattggcattgcgattccacgtggatgggggacagagtcgtcaccaagtccacccgaacctgggtgctgcccagctacaacaaccaccagtaccgagagatcaaaagcggctccgtcgacggaagcaacgccaacgcctactttggatacagcaccccctgggggtactttgactttaaccgcttccacagccactggagcccccgagactggcaaagactcatcaacaactactggggcttcagaccccggtccctcagagtcaaaatcttcaacattcaagtcaaagaggtcacggtgcaggactccaccaccaccatcgccaacaacctcacctccaccgtccaagtgtttacggacgacgactaccagctgccctacgtcgtcggcaacgggaccgagggatgcctgccggccttccctccgcaggtctttacgctgccgcagtacggttacgcgacgctgaaccgcgacaacacagaaaatcccaccgagaggagcagcttcttctgcctagagtactttcccagcaagatgctgagaacgggcaacaactttgagtttacctacaactttgaggaggtgcccttccactccagcttcgctcccagtcagaacctgttcaagctggccaacccgctggtggaccagtacttgtaccgcttcgtgagcacaaataacactggcggagtccagttcaacaagaacctggccgggagatacgccaacacctacaaaaactggttcccggggcccatgggccgaacccagggctggaacctgggctccggggtcaaccgcgccagtgtcagcgccttcgccacgaccaataggatggagctcgagggcgcgagttaccaggtgcccccgcagccgaacggcatgaccaacaacctccagggcagcaacacctatgccctggagaacactatgatcttcaacagccagccggcgaacccgggcaccaccgccacgtacctcgagggcaacatgctcatcaccagcgagagcgagacacagccggtgaaccgcgtggcgtacaacgtcggcgggcagatggccaccaacaaccagagctccaccactgcccccgcgaccggcacgtacaacctccaggaaatcgtgcccggcagcgtgtggatggagagggacgtgtacctccaaggacccatctgggccaagatcccagagacaggggcgcactttcacccctctccggccatgggcggattcggactcaaacacccaccgcccatgatgctcatcaagaacacgcctgtgcccggaaatatcaccagcttctcggacgtgcccgtcagcagcttcatcacccagtacagcaccgggcaggtcaccgtggagatggagtgggagctcaagaaggaaaactccaagaggtggaacccagagatccagtacacaaacaactacaacgacccccagtttgtggactttgccccggacagcaccggggaatacagaaccaccagacctatcggaacccgataccttacccgacccctttaa

SEQ ID NO: 215 - protein, 105 aa, Artificial Sequence
  synthetic sequence
MIVVVLCCLVIAISDPSTGSIRESLSTRQTRSRESTTSRTTSSLRRETTPTSSTTTRTPSFRRSSPTTHPSGETSERQSFRPRKGFSNLLAWLKRVLRRPLPESG

SEQ ID NO: 216 - DNA, 318 bp, Artificial Sequence
  synthetic sequence
atgatagtcgtggtcttgtgctgcctggttatcgctatctcggacccttcaacgggctcgataagggagagcctgtcaacgaggcagacgaggtcgcgcgagagcacgacatctcgtacaacgagcagcttgaggcgggagacaacccctacctcaagtacaaccacgcggacgccgagtttcaggagaagctcgccgacgacacatccttcgggggaaacctcggaaaggcagtctttcaggccaagaaaagggttctcgaaccttttggcctggttgaagagggtgctaagacggcccctaccggaaagcggatag

SEQ ID NO: 217 - protein, 723 aa, Artificial Sequence
  synthetic sequence
MSFVDHPPDWLEEVGEGLREFLGLEAGPPKPKPNQQHDQARGLVLPGYNYLGPGNGLDRGEPVNAADEVAREHDISYNEQLEAGDNPYLKYNHADAEFQEKLADDTSFGGNLGKAVFQAKKRVLEPFGLVEEGAKTAPTGKRIDDHFPKRKKARTEEDSKPSTSSDAEAGPSGSQQLQIPAQPASSLGADTMSAGGGGPLGDNNQGADGVGNASGDWHCDSTWMGDRVVTKSTRTWVLPSYNNHQYREIKSGSVDGSNANAYFGYSTPWGYFDFNRFHSHWSPRDWQRLINNYWGFRPRSLRVKIFNIQVKEVTVQDSTTTIANNLTSTVQVFTDDDYQLPYVVGNGTEGCLPAFPPQVFTLPQYGYATLNRDNTENPTERSSFFCLEYFPSKMLRTGNNFEFTYNFEEVPFHSSFAPSQNLFKLANPLVDQYLYRFVSTNNTGGVQFNKNLAGRYANTYKNWFPGPMGRTQGWNLGSGVNRASVSAFATTNRMELEGASYQVPPQPNGMTNNLQGSNTYALENTMIFNSQPANPGTTATYLEGNMLITSESETQPVNRVAYNVGGQMATNNQSSTTAPATGTYNLQEIVPGSVWMERDVYLQGPIWAKIPETGAHFHPSPAMGGFGLKHPPPMMLIKNTPVPGNITSFSDVPVSSFITQYSTGQVTVEMEWELKKENSKRWNPEIQYTNNYNDPQFVDFAPDSTGEYRTTRPIGTRYLTRPL

SEQ ID NO: 218 - DNA, 2172 bp, Artificial Sequence
  synthetic sequence
atgtcttttgttgatcaccctccagattggttggaagaagttggtgaaggtcttcgcgagtttttgggccttgaagcgggcccaccgaaaccaaaacccaatcagcagcatgatcaagcccgtggtcttgtgctgcctggttataactatctcggacccggaaacgggctcgatcgaggagagcctgtcaacgccgcagacgaggtcgcgcgagagcacgacatctcgtacaacgagcagcttgaggcgggagacaacccctacctcaagtacaaccacgcggacgccgagtttcaggagaagctcgccgacgacacatccttcgggggaaacctcggaaaggcagtctttcaggccaagaaaagggttctcgaaccttttggcctggttgaagagggtgctaagacggcccctaccggaaagcggatagacgaccactttccaaaaagaaagaaggctcggaccgaagaggactccaagccttccacctcgtcagacgccgaagctggacccagcggatcccagcagctgcaaatcccagcccaaccagcctcaagtttgggagctgatacaatgtctgcgggaggtggcggcccattgggcgacaataaccaaggtgccgatggagtgggcaatgcctcgggagattggcattgcgattccacgtggatgggggacagagtcgtcaccaagtccacccgaacctgggtgctgcccagctacaacaaccaccagtaccgagagatcaaaagcggctccgtcgacggaagcaacgccaacgcctactttggatacagcaccccctgggggtactttgactttaaccgcttccacagccactggagcccccgagactggcaaagactcatcaacaactactggggcttcagaccccggtccctcagagtcaaaatcttcaacattcaagtcaaagaggtcacggtgcaggactccaccaccaccatcgccaacaacctcacctccaccgtccaagtgtttacggacgacgactaccagctgccctacgtcgtcggcaacgggaccgagggatgcctgccggccttccctccgcaggtctttacgctgccgcagtacggttacgcgacgctgaaccgcgacaacacagaaaatcccaccgagaggagcagcttcttctgcctagagtactttcccagcaagatgctgagaacgggcaacaactttgagtttacctacaactttgaggaggtgcccttccactccagcttcgctcccagtcagaacctgttcaagctggccaacccgctggtggaccagtacttgtaccgcttcgtgagcacaaataacactggcggagtccagttcaacaagaacctggccgggagatacgccaacacctacaaaaactggttcccggggcccatgggccgaacccagggctggaacctgggctccggggtcaaccgcgccagtgtcagcgccttcgccacgaccaataggatggagctcgagggcgcgagttaccaggtgcccccgcagccgaacggcatgaccaacaacctccagggcagcaacacctatgccctggagaacactatgatcttcaacagccagccggcgaacccgggcaccaccgccacgtacctcgagggcaacatgctcatcaccagcgagagcgagacacagccggtgaaccgcgtggcgtacaacgtcggcgggcagatggccaccaacaaccagagctccaccactgcccccgcgaccggcacgtacaacctccaggaaatcgtgcccggcagcgtgtggatggagagggacgtgtacctccaaggacccatctgggccaagatcccagagacaggggcgcactttcacccctctccggccatgggcggattcggactcaaacacccaccgcccatgatgctcatcaagaacacgcctgtgcccggaaatatcaccagcttctcggacgtgcccgtcagcagcttcatcacccagtacagcaccgggcaggtcaccgtggagatggagtgggagctcaagaaggaaaactccaagaggtggaacccagagatccagtacacaaacaactacaacgacccccagtttgtggactttgccccggacagcaccggggaatacagaaccaccagacctatcggaacccgataccttacccgacccctttaa

SEQ ID NO: 219 - protein, 106 aa, Artificial Sequence
  synthetic sequence
MIKPVVLCCLVITISDPETGSIEESLSTPQTRSRESTTSRTTSSLRRETTPTSSTTTRTPSFRRSSPTTHPSGETSERQSFRPRKGFSNLLAWLKRVLRRPLPESG

SEQ ID NO: 220 - DNA, 321 bp, Artificial Sequence
  synthetic sequence
atgatcaagcccgtggtcttgtgctgcctggttataactatctcggacccggaaacgggctcgatcgaggagagcctgtcaacgccgcagacgaggtcgcgcgagagcacgacatctcgtacaacgagcagcttgaggcgggagacaacccctacctcaagtacaaccacgcggacgccgagtttcaggagaagctcgccgacgacacatccttcgggggaaacctcggaaaggcagtctttcaggccaagaaaagggttctcgaaccttttggcctggttgaagagggtgctaagacggcccctaccggaaagcggatag

SEQ ID NO: 221 - protein, 724 aa, Artificial Sequence
  synthetic sequence
MSFVDHPPDWLEEVGEGLREFLGLEAGPPKPKPNQQHVDQARGLVLPGYNYLGPGNGLDRGEPVNRADEVAREHDISYNEQLEAGDNPYLKYNHADAEFQEKLADDTSFGGNLGKAVFQAKKRVLEPFGLVEEGAKTAPTGKRIDDHFPKRKKARTEEDSKPSTSSDAEAGPSGSQQLQIPAQPASSLGADTMSAGGGGPLGDNNQGADGVGNASGDWHCDSTWMGDRVVTKSTRTWVLPSYNNHQYREIKSGSVDGSNANAYFGYSTPWGYFDFNRFHSHWSPRDWQRLINNYWGFRPRSLRVKIFNIQVKEVTVQDSTTTIANNLTSTVQVFTDDDYQLPYVVGNGTEGCLPAFPPQVFTLPQYGYATLNRDNTENPTERSSFFCLEYFPSKMLRTGNNFEFTYNFEEVPFHSSFAPSQNLFKLANPLVDQYLYRFVSTNNTGGVQFNKNLAGRYANTYKNWFPGPMGRTQGWNLGSGVNRASVSAFATTNRMELEGASYQVPPQPNGMTNNLQGSNTYALENTMIFNSQPANPGTTATYLEGNMLITSESETQPVNRVAYNVGGQMATNNQSSTTAPATGTYNLQEIVPGSVWMERDVYLQGPIWAKIPETGAHFHPSPAMGGFGLKHPPPMMLIKNTPVPGNITSFSDVPVSSFITQYSTGQVTVEMEWELKKENSKRWNPEIQYTNNYNDPQFVDFAPDSTGEYRTTRPIGTRYLTRPL

SEQ ID NO: 222 - DNA, 2175 bp, Artificial Sequence
  synthetic sequence
atgtcttttgttgatcaccctccagattggttggaagaagttggtgaaggtcttcgcgagtttttgggccttgaagcgggcccaccgaaaccaaaacccaatcagcagcatgtggatcaagcccgtggtcttgtgctgcctggttataactatctcggacccggaaacgggctcgatcgaggagagcctgtcaacagggcagacgaggtcgcgcgagagcacgacatctcgtacaacgagcagcttgaggcgggagacaacccctacctcaagtacaaccacgcggacgccgagtttcaggagaagctcgccgacgacacatccttcgggggaaacctcggaaaggcagtctttcaggccaagaaaagggttctcgaaccttttggcctggttgaagagggtgctaagacggcccctaccggaaagcggatagacgaccactttccaaaaagaaagaaggctcggaccgaagaggactccaagccttccacctcgtcagacgccgaagctggacccagcggatcccagcagctgcaaatcccagcccaaccagcctcaagtttgggagctgatacaatgtctgcgggaggtggcggcccattgggcgacaataaccaaggtgccgatggagtgggcaatgcctcgggagattggcattgcgattccacgtggatgggggacagagtcgtcaccaagtccacccgaacctgggtgctgcccagctacaacaaccaccagtaccgagagatcaaaagcggctccgtcgacggaagcaacgccaacgcctactttggatacagcaccccctgggggtactttgactttaaccgcttccacagccactggagcccccgagactggcaaagactcatcaacaactactggggcttcagaccccggtccctcagagtcaaaatcttcaacattcaagtcaaagaggtcacggtgcaggactccaccaccaccatcgccaacaacctcacctccaccgtccaagtgtttacggacgacgactaccagctgccctacgtcgtcggcaacgggaccgagggatgcctgccggccttccctccgcaggtctttacgctgccgcagtacggttacgcgacgctgaaccgcgacaacacagaaaatcccaccgagaggagcagcttcttctgcctagagtactttcccagcaagatgctgagaacgggcaacaactttgagtttacctacaactttgaggaggtgcccttccactccagcttcgctcccagtcagaacctgttcaagctggccaacccgctggtggaccagtacttgtaccgcttcgtgagcacaaataacactggcggagtccagttcaacaagaacctggccgggagatacgccaacacctacaaaaactggttcccggggcccatgggccgaacccagggctggaacctgggctccggggtcaaccgcgccagtgtcagcgccttcgccacgaccaataggatggagctcgagggcgcgagttaccaggtgcccccgcagccgaacggcatgaccaacaacctccagggcagcaacacctatgccctggagaacactatgatcttcaacagccagccggcgaacccgggcaccaccgccacgtacctcgagggcaacatgctcatcaccagcgagagcgagacacagccggtgaaccgcgtggcgtacaacgtcggcgggcagatggccaccaacaaccagagctccaccactgcccccgcgaccggcacgtacaacctccaggaaatcgtgcccggcagcgtgtggatggagagggacgtgtacctccaaggacccatctgggccaagatcccagagacaggggcgcactttcacccctctccggccatgggcggattcggactcaaacacccaccgcccatgatgctcatcaagaacacgcctgtgcccggaaatatcaccagcttctcggacgtgcccgtcagcagcttcatcacccagtacagcaccgggcaggtcaccgtggagatggagtgggagctcaagaaggaaaactccaagaggtggaacccagagatccagtacacaaacaactacaacgacccccagtttgtggactttgccccggacagcaccggggaatacagaaccaccagacctatcggaacccgataccttacccgacccctttaa

SEQ ID NO: 223 - protein, 107 aa, Artificial Sequence
  synthetic sequence
MWIKPVVLCCLVITISDPETGSIEESLSTGQTRSRESTTSRTTSSLRRETTPTSSTTTRTPSFRRSSPTTHPSGETSERQSFRPRKGFSNLLAWLKRVLRRPLPESG

SEQ ID NO: 224 - DNA, 324 bp, Artificial Sequence
  synthetic sequence
atgtggatcaagcccgtggtcttgtgctgcctggttataactatctcggacccggaaacgggctcgatcgaggagagcctgtcaacagggcagacgaggtcgcgcgagagcacgacatctcgtacaacgagcagcttgaggcgggagacaacccctacctcaagtacaaccacgcggacgccgagtttcaggagaagctcgccgacgacacatccttcgggggaaacctcggaaaggcagtctttcaggccaagaaaagggttctcgaaccttttggcctggttgaagagggtgctaagacggcccctaccggaaagcggatag

SEQ ID NO: 225 - protein, 723 aa, Artificial Sequence
  synthetic sequence
MSFVDHPPDWLEEVGEGLREFLGLEAGPPKPKPNQQKQDARGLVLPGYKYLGPFNGLDRGEPVNRADEVAREHDISYNEQLEAGDNPYLKYNHADAEFQEKLADDTSFGGNLGKAVFQAKKRVLEPFGLVEEGAKTAPTGKRIDDHFPKRKKARTEEDSKPSTSSDAEAGPSGSQQLQIPAQPASSLGADTMSAGGGGPLGDNNQGADGVGNASGDWHCDSTWMGDRVVTKSTRTWVLPSYNNHQYREIKSGSVDGSNANAYFGYSTPWGYFDFNRFHSHWSPRDWQRLINNYWGFRPRSLRVKIFNIQVKEVTVQDSTTTIANNLTSTVQVFTDDDYQLPYVVGNGTEGCLPAFPPQVFTLPQYGYATLNRDNTENPTERSSFFCLEYFPSKMLRTGNNFEFTYNFEEVPFHSSFAPSQNLFKLANPLVDQYLYRFVSTNNTGGVQFNKNLAGRYANTYKNWFPGPMGRTQGWNLGSGVNRASVSAFATTNRMELEGASYQVPPQPNGMTNNLQGSNTYALENTMIFNSQPANPGTTATYLEGNMLITSESETQPVNRVAYNVGGQMATNNQSSTTAPATGTYNLQEIVPGSVWMERDVYLQGPIWAKIPETGAHFHPSPAMGGFGLKHPPPMMLIKNTPVPGNITSFSDVPVSSFITQYSTGQVTVEMEWELKKENSKRWNPEIQYTNNYNDPQFVDFAPDSTGEYRTTRPIGTRYLTRPL

SEQ ID NO: 226 - DNA, 2172 bp, Artificial Sequence
  synthetic sequence
atgtcttttgttgatcaccctccagattggttggaagaagttggtgaaggtcttcgcgagtttttgggccttgaagcgggcccaccgaaaccaaaacccaatcagcagaagcaagatgcccgtggtcttgtgctgcctggttataaatatctcggacccttcaacgggctcgatcgaggagagcctgtcaacagggcagacgaggtcgcgcgagagcacgacatctcgtacaacgagcagcttgaggcgggagacaacccctacctcaagtacaaccacgcggacgccgagtttcaggagaagctcgccgacgacacatccttcgggggaaacctcggaaaggcagtctttcaggccaagaaaagggttctcgaaccttttggcctggttgaagagggtgctaagacggcccctaccggaaagcggatagacgaccactttccaaaaagaaagaaggctcggaccgaagaggactccaagccttccacctcgtcagacgccgaagctggacccagcggatcccagcagctgcaaatcccagcccaaccagcctcaagtttgggagctgatacaatgtctgcgggaggtggcggcccattgggcgacaataaccaaggtgccgatggagtgggcaatgcctcgggagattggcattgcgattccacgtggatgggggacagagtcgtcaccaagtccacccgaacctgggtgctgcccagctacaacaaccaccagtaccgagagatcaaaagcggctccgtcgacggaagcaacgccaacgcctactttggatacagcaccccctgggggtactttgactttaaccgcttccacagccactggagcccccgagactggcaaagactcatcaacaactactggggcttcagaccccggtccctcagagtcaaaatcttcaacattcaagtcaaagaggtcacggtgcaggactccaccaccaccatcgccaacaacctcacctccaccgtccaagtgtttacggacgacgactaccagctgccctacgtcgtcggcaacgggaccgagggatgcctgccggccttccctccgcaggtctttacgctgccgcagtacggttacgcgacgctgaaccgcgacaacacagaaaatcccaccgagaggagcagcttcttctgcctagagtactttcccagcaagatgctgagaacgggcaacaactttgagtttacctacaactttgaggaggtgcccttccactccagcttcgctcccagtcagaacctgttcaagctggccaacccgctggtggaccagtacttgtaccgcttcgtgagcacaaataacactggcggagtccagttcaacaagaacctggccgggagatacgccaacacctacaaaaactggttcccggggcccatgggccgaacccagggctggaacctgggctccggggtcaaccgcgccagtgtcagcgccttcgccacgaccaataggatggagctcgagggcgcgagttaccaggtgcccccgcagccgaacggcatgaccaacaacctccagggcagcaacacctatgccctggagaacactatgatcttcaacagccagccggcgaacccgggcaccaccgccacgtacctcgagggcaacatgctcatcaccagcgagagcgagacacagccggtgaaccgcgtggcgtacaacgtcggcgggcagatggccaccaacaaccagagctccaccactgcccccgcgaccggcacgtacaacctccaggaaatcgtgcccggcagcgtgtggatggagagggacgtgtacctccaaggacccatctgggccaagatcccagagacaggggcgcactttcacccctctccggccatgggcggattcggactcaaacacccaccgcccatgatgctcatcaagaacacgcctgtgcccggaaatatcaccagcttctcggacgtgcccgtcagcagcttcatcacccagtacagcaccgggcaggtcaccgtggagatggagtgggagctcaagaaggaaaactccaagaggtggaacccagagatccagtacacaaacaactacaacgacccccagtttgtggactttgccccggacagcaccggggaatacagaaccaccagacctatcggaacccgataccttacccgacccctttaa

SEQ ID NO: 227 - protein, 104 aa, Artificial Sequence
  synthetic sequence
MPVVLCCLVINISDPSTGSIEESLSTGQTRSRESTTSRTTSSLRRETTPTSSTTTRTPSFRRSSPTTHPSGETSERQSFRPRKGFSNLLAWLKRVLRRPLPESG

SEQ ID NO: 228 - DNA, 315 bp, Artificial Sequence
  synthetic sequence
atgcccgtggtcttgtgctgcctggttataaatatctcggacccttcaacgggctcgatcgaggagagcctgtcaacagggcagacgaggtcgcgcgagagcacgacatctcgtacaacgagcagcttgaggcgggagacaacccctacctcaagtacaaccacgcggacgccgagtttcaggagaagctcgccgacgacacatccttcgggggaaacctcggaaaggcagtctttcaggccaagaaaagggttctcgaaccttttggcctggttgaagagggtgctaagacggcccctaccggaaagcggatag

SEQ ID NO: 229 - protein, 725 aa, Artificial Sequence
  synthetic sequence
MSFVDHPPDWLEEVGEGLREFLGLEAGPPKPKPNQQHDQDQARGLVLPGYNYLGPGNGLDRGEPVNRADEVAREHDISYNEQLEAGDNPYLKYNHADAEFQEKLADDTSFGGNLGKAVFQAKKRVLEPFGLVEEGAKTAPTGKRIDDHFPKRKKARTEEDSKPSTSSDAEAGPSGSQQLQIPAQPASSLGADTMSAGGGGPLGDNNQGADGVGNASGDWHCDSTWMGDRVVTKSTRTWVLPSYNNHQYREIKSGSVDGSNANAYFGYSTPWGYFDFNRFHSHWSPRDWQRLINNYWGFRPRSLRVKIFNIQVKEVTVQDSTTTIANNLTSTVQVFTDDDYQLPYVVGNGTEGCLPAFPPQVFTLPQYGYATLNRDNTENPTERSSFFCLEYFPSKMLRTGNNFEFTYNFEEVPFHSSFAPSQNLFKLANPLVDQYLYRFVSTNNTGGVQFNKNLAGRYANTYKNWFPGPMGRTQGWNLGSGVNRASVSAFATTNRMELEGASYQVPPQPNGMTNNLQGSNTYALENTMIFNSQPANPGTTATYLEGNMLITSESETQPVNRVAYNVGGQMATNNQSSTTAPATGTYNLQEIVPGSVWMERDVYLQGPIWAKIPETGAHFHPSPAMGGFGLKHPPPMMLIKNTPVPGNITSFSDVPVSSFITQYSTGQVTVEMEWELKKENSKRWNPEIQYTNNYNDPQFVDFAPDSTGEYRTTRPIGTRYLTRPL

SEQ ID NO: 230 - DNA, 2178 bp, Artificial Sequence
  synthetic sequence
atgtcttttgttgatcaccctccagattggttggaagaagttggtgaaggtcttcgcgagtttttgggccttgaagcgggcccaccgaaaccaaaacccaatcagcagcatgaccaagatcaagcccgtggtcttgtgctgcctggttataactatctcggacccggaaacgggctcgatcgaggagagcctgtcaacagggcagacgaggtcgcgcgagagcacgacatctcgtacaacgagcagcttgaggcgggagacaacccctacctcaagtacaaccacgcggacgccgagtttcaggagaagctcgccgacgacacatccttcgggggaaacctcggaaaggcagtctttcaggccaagaaaagggttctcgaaccttttggcctggttgaagagggtgctaagacggcccctaccggaaagcggatagacgaccactttccaaaaagaaagaaggctcggaccgaagaggactccaagccttccacctcgtcagacgccgaagctggacccagcggatcccagcagctgcaaatcccagcccaaccagcctcaagtttgggagctgatacaatgtctgcgggaggtggcggcccattgggcgacaataaccaaggtgccgatggagtgggcaatgcctcgggagattggcattgcgattccacgtggatgggggacagagtcgtcaccaagtccacccgaacctgggtgctgcccagctacaacaaccaccagtaccgagagatcaaaagcggctccgtcgacggaagcaacgccaacgcctactttggatacagcaccccctgggggtactttgactttaaccgcttccacagccactggagcccccgagactggcaaagactcatcaacaactactggggcttcagaccccggtccctcagagtcaaaatcttcaacattcaagtcaaagaggtcacggtgcaggactccaccaccaccatcgccaacaacctcacctccaccgtccaagtgtttacggacgacgactaccagctgccctacgtcgtcggcaacgggaccgagggatgcctgccggccttccctccgcaggtctttacgctgccgcagtacggttacgcgacgctgaaccgcgacaacacagaaaatcccaccgagaggagcagcttcttctgcctagagtactttcccagcaagatgctgagaacgggcaacaactttgagtttacctacaactttgaggaggtgcccttccactccagcttcgctcccagtcagaacctgttcaagctggccaacccgctggtggaccagtacttgtaccgcttcgtgagcacaaataacactggcggagtccagttcaacaagaacctggccgggagatacgccaacacctacaaaaactggttcccggggcccatgggccgaacccagggctggaacctgggctccggggtcaaccgcgccagtgtcagcgccttcgccacgaccaataggatggagctcgagggcgcgagttaccaggtgcccccgcagccgaacggcatgaccaacaacctccagggcagcaacacctatgccctggagaacactatgatcttcaacagccagccggcgaacccgggcaccaccgccacgtacctcgagggcaacatgctcatcaccagcgagagcgagacacagccggtgaaccgcgtggcgtacaacgtcggcgggcagatggccaccaacaaccagagctccaccactgcccccgcgaccggcacgtacaacctccaggaaatcgtgcccggcagcgtgtggatggagagggacgtgtacctccaaggacccatctgggccaagatcccagagacaggggcgcactttcacccctctccggccatgggcggattcggactcaaacacccaccgcccatgatgctcatcaagaacacgcctgtgcccggaaatatcaccagcttctcggacgtgcccgtcagcagcttcatcacccagtacagcaccgggcaggtcaccgtggagatggagtgggagctcaagaaggaaaactccaagaggtggaacccagagatccagtacacaaacaactacaacgacccccagtttgtggactttgccccggacagcaccggggaatacagaaccaccagacctatcggaacccgataccttacccgacccctttaa

SEQ ID NO: 231 - protein, 108 aa, Artificial Sequence
  synthetic sequence
MTKIKPVVLCCLVITISDPETGSIEESLSTGQTRSRESTTSRTTSSLRRETTPTSSTTTRTPSFRRSSPTTHPSGETSERQSFRPRKGFSNLLAWLKRVLRRPLPESG

SEQ ID NO: 232 - DNA, 327 bp, Artificial Sequence
  synthetic sequence
atgaccaagatcaagcccgtggtcttgtgctgcctggttataactatctcggacccggaaacgggctcgatcgaggagagcctgtcaacagggcagacgaggtcgcgcgagagcacgacatctcgtacaacgagcagcttgaggcgggagacaacccctacctcaagtacaaccacgcggacgccgagtttcaggagaagctcgccgacgacacatccttcgggggaaacctcggaaaggcagtctttcaggccaagaaaagggttctcgaaccttttggcctggttgaagagggtgctaagacggcccctaccggaaagcggatag

SEQ ID NO: 233 - protein, 724 aa, Artificial Sequence
  synthetic sequence
MSFVDHPPDWLEEVGEGLREFLGLEAGPPKPKPNEQHQDQARGLVLPGYKYLGPFNGLDRGEPVNRADEVAREHDISYNEQLEAGDNPYLKYNHADAEFQEKLADDTSFGGNLGKAVFQAKKRVLEPFGLVEEGAKTAPTGKRIDDHFPKRKKARTEEDSKPSTSSDAEAGPSGSQQLQIPAQPASSLGADTMSAGGGGPLGDNNQGADGVGNASGDWHCDSTWMGDRVVTKSTRTWVLPSYNNHQYREIKSGSVDGSNANAYFGYSTPWGYFDFNRFHSHWSPRDWQRLINNYWGFRPRSLRVKIFNIQVKEVTVQDSTTTIANNLTSTVQVFTDDDYQLPYVVGNGTEGCLPAFPPQVFTLPQYGYATLNRDNTENPTERSSFFCLEYFPSKMLRTGNNFEFTYNFEEVPFHSSFAPSQNLFKLANPLVDQYLYRFVSTNNTGGVQFNKNLAGRYANTYKNWFPGPMGRTQGWNLGSGVNRASVSAFATTNRMELEGASYQVPPQPNGMTNNLQGSNTYALENTMIFNSQPANPGTTATYLEGNMLITSESETQPVNRVAYNVGGQMATNNQSSTTAPATGTYNLQEIVPGSVWMERDVYLQGPIWAKIPETGAHFHPSPAMGGFGLKHPPPMMLIKNTPVPGNITSFSDVPVSSFITQYSTGQVTVEMEWELKKENSKRWNPEIQYTNNYNDPQFVDFAPDSTGEYRTTRPIGTRYLTRPL

SEQ ID NO: 234 - DNA, 2175 bp, Artificial Sequence
  synthetic sequence
atgtcttttgttgatcaccctccagattggttggaagaagttggtgaaggtcttcgcgagtttttgggccttgaagcgggcccaccgaaaccaaaacccaatgaacagcatcaagatcaagcccgtggtcttgtgctgcctggttataaatatctcggacccttcaacgggctcgatcgaggagagcctgtcaacagggcagacgaggtcgcgcgagagcacgacatctcgtacaacgagcagcttgaggcgggagacaacccctacctcaagtacaaccacgcggacgccgagtttcaggagaagctcgccgacgacacatccttcgggggaaacctcggaaaggcagtctttcaggccaagaaaagggttctcgaaccttttggcctggttgaagagggtgctaagacggcccctaccggaaagcggatagacgaccactttccaaaaagaaagaaggctcggaccgaagaggactccaagccttccacctcgtcagacgccgaagctggacccagcggatcccagcagctgcaaatcccagcccaaccagcctcaagtttgggagctgatacaatgtctgcgggaggtggcggcccattgggcgacaataaccaaggtgccgatggagtgggcaatgcctcgggagattggcattgcgattccacgtggatgggggacagagtcgtcaccaagtccacccgaacctgggtgctgcccagctacaacaaccaccagtaccgagagatcaaaagcggctccgtcgacggaagcaacgccaacgcctactttggatacagcaccccctgggggtactttgactttaaccgcttccacagccactggagcccccgagactggcaaagactcatcaacaactactggggcttcagaccccggtccctcagagtcaaaatcttcaacattcaagtcaaagaggtcacggtgcaggactccaccaccaccatcgccaacaacctcacctccaccgtccaagtgtttacggacgacgactaccagctgccctacgtcgtcggcaacgggaccgagggatgcctgccggccttccctccgcaggtctttacgctgccgcagtacggttacgcgacgctgaaccgcgacaacacagaaaatcccaccgagaggagcagcttcttctgcctagagtactttcccagcaagatgctgagaacgggcaacaactttgagtttacctacaactttgaggaggtgcccttccactccagcttcgctcccagtcagaacctgttcaagctggccaacccgctggtggaccagtacttgtaccgcttcgtgagcacaaataacactggcggagtccagttcaacaagaacctggccgggagatacgccaacacctacaaaaactggttcccggggcccatgggccgaacccagggctggaacctgggctccggggtcaaccgcgccagtgtcagcgccttcgccacgaccaataggatggagctcgagggcgcgagttaccaggtgcccccgcagccgaacggcatgaccaacaacctccagggcagcaacacctatgccctggagaacactatgatcttcaacagccagccggcgaacccgggcaccaccgccacgtacctcgagggcaacatgctcatcaccagcgagagcgagacacagccggtgaaccgcgtggcgtacaacgtcggcgggcagatggccaccaacaaccagagctccaccactgcccccgcgaccggcacgtacaacctccaggaaatcgtgcccggcagcgtgtggatggagagggacgtgtacctccaaggacccatctgggccaagatcccagagacaggggcgcactttcacccctctccggccatgggcggattcggactcaaacacccaccgcccatgatgctcatcaagaacacgcctgtgcccggaaatatcaccagcttctcggacgtgcccgtcagcagcttcatcacccagtacagcaccgggcaggtcaccgtggagatggagtgggagctcaagaaggaaaactccaagaggtggaacccagagatccagtacacaaacaactacaacgacccccagtttgtggactttgccccggacagcaccggggaatacagaaccaccagacctatcggaacccgataccttacccgacccctttaa

SEQ ID NO: 235 - protein, 110 aa, Artificial Sequence
  synthetic sequence
MNSIKIKPVVLCCLVINISDPSTGSIEESLSTGQTRSRESTTSRTTSSLRRETTPTSSTTTRTPSFRRSSPTTHPSGETSERQSFRPRKGFSNLLAWLKRVLRRPLPESG

SEQ ID NO: 236 - DNA, 333 bp, Artificial Sequence
  synthetic sequence
atgaacagcatcaagatcaagcccgtggtcttgtgctgcctggttataaatatctcggacccttcaacgggctcgatcgaggagagcctgtcaacagggcagacgaggtcgcgcgagagcacgacatctcgtacaacgagcagcttgaggcgggagacaacccctacctcaagtacaaccacgcggacgccgagtttcaggagaagctcgccgacgacacatccttcgggggaaacctcggaaaggcagtctttcaggccaagaaaagggttctcgaaccttttggcctggttgaagagggtgctaagacggcccctaccggaaagcggatag

SEQ ID NO: 237 - protein, 724 aa, Artificial Sequence
  synthetic sequence
MSFVDHPPDWLEEVGEGLREFLGLEAGPPKPKPNQQHQDQARGLVLPGYNYLGPGNGLDRGEPVNRADAVAREHDKAYDEQLKAGDNPYLKYNHADAEFQEKLADDTSFGGNLGKAVFQAKKRVLEPFGLVEEGAKTAPTGKRIDDHFPKRKKARTEEDSKPSTSSDAEAGPSGSQQLQIPAQPASSLGADTMSAGGGGPLGDNNQGADGVGNASGDWHCDSTWMGDRVVTKSTRTWVLPSYNNHQYREIKSGSVDGSNANAYFGYSTPWGYFDFNRFHSHWSPRDWQRLINNYWGFRPRSLRVKIFNIQVKEVTVQDSTTTIANNLTSTVQVFTDDDYQLPYVVGNGTEGCLPAFPPQVFTLPQYGYATLNRDNTENPTERSSFFCLEYFPSKMLRTGNNFEFTYNFEEVPFHSSFAPSQNLFKLANPLVDQYLYRFVSTNNTGGVQFNKNLAGRYANTYKNWFPGPMGRTQGWNLGSGVNRASVSAFATTNRMELEGASYQVPPQPNGMTNNLQGSNTYALENTMIFNSQPANPGTTATYLEGNMLITSESETQPVNRVAYNVGGQMATNNQSSTTAPATGTYNLQEIVPGSVWMERDVYLQGPIWAKIPETGAHFHPSPAMGGFGLKHPPPMMLIKNTPVPGNITSFSDVPVSSFITQYSTGQVTVEMEWELKKENSKRWNPEIQYTNNYNDPQFVDFAPDSTGEYRTTRPIGTRYLTRPL

SEQ ID NO: 238 - DNA, 2175 bp, Artificial Sequence
  synthetic sequence
atgtcttttgttgatcaccctccagattggttggaagaagttggtgaaggtcttcgcgagtttttgggccttgaagcgggcccaccgaaaccaaaacccaatcagcagcatcaagatcaagcccgtggtcttgtgctgcctggttataactatctcggacccggaaacgggctcgatcgaggagagcctgtcaacagggcagacgccgtcgcgcgagagcacgacaaagcatacgatgagcagcttaaagcgggagacaacccctacctcaagtacaaccacgcggacgccgagtttcaggagaagctcgccgacgacacatccttcgggggaaacctcggaaaggcagtctttcaggccaagaaaagggttctcgaaccttttggcctggttgaagagggtgctaagacggcccctaccggaaagcggatagacgaccactttccaaaaagaaagaaggctcggaccgaagaggactccaagccttccacctcgtcagacgccgaagctggacccagcggatcccagcagctgcaaatcccagcccaaccagcctcaagtttgggagctgatacaatgtctgcgggaggtggcggcccattgggcgacaataaccaaggtgccgatggagtgggcaatgcctcgggagattggcattgcgattccacgtggatgggggacagagtcgtcaccaagtccacccgaacctgggtgctgcccagctacaacaaccaccagtaccgagagatcaaaagcggctccgtcgacggaagcaacgccaacgcctactttggatacagcaccccctgggggtactttgactttaaccgcttccacagccactggagcccccgagactggcaaagactcatcaacaactactggggcttcagaccccggtccctcagagtcaaaatcttcaacattcaagtcaaagaggtcacggtgcaggactccaccaccaccatcgccaacaacctcacctccaccgtccaagtgtttacggacgacgactaccagctgccctacgtcgtcggcaacgggaccgagggatgcctgccggccttccctccgcaggtctttacgctgccgcagtacggttacgcgacgctgaaccgcgacaacacagaaaatcccaccgagaggagcagcttcttctgcctagagtactttcccagcaagatgctgagaacgggcaacaactttgagtttacctacaactttgaggaggtgcccttccactccagcttcgctcccagtcagaacctgttcaagctggccaacccgctggtggaccagtacttgtaccgcttcgtgagcacaaataacactggcggagtccagttcaacaagaacctggccgggagatacgccaacacctacaaaaactggttcccggggcccatgggccgaacccagggctggaacctgggctccggggtcaaccgcgccagtgtcagcgccttcgccacgaccaataggatggagctcgagggcgcgagttaccaggtgcccccgcagccgaacggcatgaccaacaacctccagggcagcaacacctatgccctggagaacactatgatcttcaacagccagccggcgaacccgggcaccaccgccacgtacctcgagggcaacatgctcatcaccagcgagagcgagacacagccggtgaaccgcgtggcgtacaacgtcggcgggcagatggccaccaacaaccagagctccaccactgcccccgcgaccggcacgtacaacctccaggaaatcgtgcccggcagcgtgtggatggagagggacgtgtacctccaaggacccatctgggccaagatcccagagacaggggcgcactttcacccctctccggccatgggcggattcggactcaaacacccaccgcccatgatgctcatcaagaacacgcctgtgcccggaaatatcaccagcttctcggacgtgcccgtcagcagcttcatcacccagtacagcaccgggcaggtcaccgtggagatggagtgggagctcaagaaggaaaactccaagaggtggaacccagagatccagtacacaaacaactacaacgacccccagtttgtggactttgccccggacagcaccggggaatacagaaccaccagacctatcggaacccgataccttacccgacccctttaa

SEQ ID NO: 239 - protein, 65 aa, Artificial Sequence
  synthetic sequence
MSSLKRETTPTSSTTTRTPSFRRSSPTTHPSGETSERQSFRPRKGFSNLLAWLKRVLRRPLPESG

SEQ ID NO: 240 - DNA, 198 bp, Artificial Sequence
  synthetic sequence
atgagcagcttaaagcgggagacaacccctacctcaagtacaaccacgcggacgccgagtttcaggagaagctcgccgacgacacatccttcgggggaaacctcggaaaggcagtctttcaggccaagaaaagggttctcgaaccttttggcctggttgaagagggtgctaagacggcccctaccggaaagcggatag

SEQ ID NO: 241 - protein, 724 aa, Artificial Sequence
  synthetic sequence
MSFVDHPPDWLEEVGEGLREFLGLEAGPPKPKPNQQHEDQARGLVLPGYNYLGPGNGLDRGEPVNRADEVAREHDISYNEQLEAGDNPYLKYNHADAEFQEKLADDTSFGGNLGKAVFQAKKRVLEPFGLVEEGAKTAPTGKRIDDHFPKRKKARTEEDSKPSTSSDAEAGPSGSQQLQIPAQPASSLGADTMSAGGGGPLGDNNQGADGVGNASGDWHCDSTWMGDRVVTKSTRTWVLPSYNNHQYREIKSGSVDGSNANAYFGYSTPWGYFDFNRFHSHWSPRDWQRLINNYWGFRPRSLRVKIFNIQVKEVTVQDSTTTIANNLTSTVQVFTDDDYQLPYVVGNGTEGCLPAFPPQVFTLPQYGYATLNRDNTENPTERSSFFCLEYFPSKMLRTGNNFEFTYNFEEVPFHSSFAPSQNLFKLANPLVDQYLYRFVSTNNTGGVQFNKNLAGRYANTYKNWFPGPMGRTQGWNLGSGVNRASVSAFATTNRMELEGASYQVPPQPNGMTNNLQGSNTYALENTMIFNSQPANPGTTATYLEGNMLITSESETQPVNRVAYNVGGQMATNNQSSTTAPATGTYNLQEIVPGSVWMERDVYLQGPIWAKIPETGAHFHPSPAMGGFGLKHPPPMMLIKNTPVPGNITSFSDVPVSSFITQYSTGQVTVEMEWELKKENSKRWNPEIQYTNNYNDPQFVDFAPDSTGEYRTTRPIGTRYLTRPL

SEQ ID NO: 242 - DNA, 2175 bp, Artificial Sequence
  synthetic sequence
atgtcttttgttgatcaccctccagattggttggaagaagttggtgaaggtcttcgcgagtttttgggccttgaagcgggcccaccgaaaccaaaacccaatcagcagcatgaggatcaagcccgtggtcttgtgctgcctggttataactatctcggacccggaaacgggctcgatcgaggagagcctgtcaacagggcagacgaggtcgcgcgagagcacgacatctcgtacaacgagcagcttgaggcgggagacaacccctacctcaagtacaaccacgcggacgccgagtttcaggagaagctcgccgacgacacatccttcgggggaaacctcggaaaggcagtctttcaggccaagaaaagggttctcgaaccttttggcctggttgaagagggtgctaagacggcccctaccggaaagcggatagacgaccactttccaaaaagaaagaaggctcggaccgaagaggactccaagccttccacctcgtcagacgccgaagctggacccagcggatcccagcagctgcaaatcccagcccaaccagcctcaagtttgggagctgatacaatgtctgcgggaggtggcggcccattgggcgacaataaccaaggtgccgatggagtgggcaatgcctcgggagattggcattgcgattccacgtggatgggggacagagtcgtcaccaagtccacccgaacctgggtgctgcccagctacaacaaccaccagtaccgagagatcaaaagcggctccgtcgacggaagcaacgccaacgcctactttggatacagcaccccctgggggtactttgactttaaccgcttccacagccactggagcccccgagactggcaaagactcatcaacaactactggggcttcagaccccggtccctcagagtcaaaatcttcaacattcaagtcaaagaggtcacggtgcaggactccaccaccaccatcgccaacaacctcacctccaccgtccaagtgtttacggacgacgactaccagctgccctacgtcgtcggcaacgggaccgagggatgcctgccggccttccctccgcaggtctttacgctgccgcagtacggttacgcgacgctgaaccgcgacaacacagaaaatcccaccgagaggagcagcttcttctgcctagagtactttcccagcaagatgctgagaacgggcaacaactttgagtttacctacaactttgaggaggtgcccttccactccagcttcgctcccagtcagaacctgttcaagctggccaacccgctggtggaccagtacttgtaccgcttcgtgagcacaaataacactggcggagtccagttcaacaagaacctggccgggagatacgccaacacctacaaaaactggttcccggggcccatgggccgaacccagggctggaacctgggctccggggtcaaccgcgccagtgtcagcgccttcgccacgaccaataggatggagctcgagggcgcgagttaccaggtgcccccgcagccgaacggcatgaccaacaacctccagggcagcaacacctatgccctggagaacactatgatcttcaacagccagccggcgaacccgggcaccaccgccacgtacctcgagggcaacatgctcatcaccagcgagagcgagacacagccggtgaaccgcgtggcgtacaacgtcggcgggcagatggccaccaacaaccagagctccaccactgcccccgcgaccggcacgtacaacctccaggaaatcgtgcccggcagcgtgtggatggagagggacgtgtacctccaaggacccatctgggccaagatcccagagacaggggcgcactttcacccctctccggccatgggcggattcggactcaaacacccaccgcccatgatgctcatcaagaacacgcctgtgcccggaaatatcaccagcttctcggacgtgcccgtcagcagcttcatcacccagtacagcaccgggcaggtcaccgtggagatggagtgggagctcaagaaggaaaactccaagaggtggaacccagagatccagtacacaaacaactacaacgacccccagtttgtggactttgccccggacagcaccggggaatacagaaccaccagacctatcggaacccgataccttacccgacccctttaa

SEQ ID NO: 243 - protein, 107 aa, Artificial Sequence
  synthetic sequence
MRIKPVVLCCLVITISDPETGSIEESLSTGQTRSRESTTSRTTSSLRRETTPTSSTTTRTPSFRRSSPTTHPSGETSERQSFRPRKGFSNLLAWLKRVLRRPLPESG

SEQ ID NO: 244 - DNA, 324 bp, Artificial Sequence
  synthetic sequence
atgaggatcaagcccgtggtcttgtgctgcctggttataactatctcggacccggaaacgggctcgatcgaggagagcctgtcaacagggcagacgaggtcgcgcgagagcacgacatctcgtacaacgagcagcttgaggcgggagacaacccctacctcaagtacaaccacgcggacgccgagtttcaggagaagctcgccgacgacacatccttcgggggaaacctcggaaaggcagtctttcaggccaagaaaagggttctcgaaccttttggcctggttgaagagggtgctaagacggcccctaccggaaagcggatag

SEQ ID NO: 245 - protein, 724 aa, Artificial Sequence
  synthetic sequence
MSFVDHPPDWLEEVGEGLREFLGLEPGPPKPKPNQQHQDQARGLVLPGYNYLGPGNGLDRGEPVNRADEVAREHDISYNEQLEAGDNPYLKYNHADAEFQEKLADDTSFGGNLGKAVFQAKKRVLEPFGLVEEGAKTAPTGKRIDDHFPKRKKARTEEDSKPSTSSDAEAGPSGSQQLQIPAQPASSLGADTMSAGGGGPLGDNNQGADGVGNASGDWHCDSTWMGDRVVTKSTRTWVLPSYNNHQYREIKSGSVDGSNANAYFGYSTPWGYFDFNRFHSHWSPRDWQRLINNYWGFRPRSLRVKIFNIQVKEVTVQDSTTTIANNLTSTVQVFTDDDYQLPYVVGNGTEGCLPAFPPQVFTLPQYGYATLNRDNTENPTERSSFFCLEYFPSKMLRTGNNFEFTYNFEEVPFHSSFAPSQNLFKLANPLVDQYLYRFVSTNNTGGVQFNKNLAGRYANTYKNWFPGPMGRTQGWNLGSGVNRASVSAFATTNRMELEGASYQVPPQPNGMTNNLQGSNTYALENTMIFNSQPANPGTTATYLEGNMLITSESETQPVNRVAYNVGGQMATNNQSSTTAPATGTYNLQEIVPGSVWMERDVYLQGPIWAKIPETGAHFHPSPAMGGFGLKHPPPMMLIKNTPVPGNITSFSDVPVSSFITQYSTGQVTVEMEWELKKENSKRWNPEIQYTNNYNDPQFVDFAPDSTGEYRTTRPIGTRYLTRPL

SEQ ID NO: 246 - DNA, 2175 bp, Artificial Sequence
  synthetic sequence
atgtcttttgttgatcaccctccagattggttggaagaagttggtgaagggcttcgcgagtttttgggccttgaacctggcccaccgaaaccaaaacccaatcagcagcatcaagatcaagcccgtggtcttgtgctgcctggttataactatctcggacccggaaacgggctcgatcgaggagagcctgtcaacagggcagacgaggtcgcgcgagagcacgacatctcgtacaacgagcagcttgaggcgggagacaacccctacctcaagtacaaccacgcggacgccgagtttcaggagaagctcgccgacgacacatccttcgggggaaacctcggaaaggcagtctttcaggccaagaaaagggttctcgaaccttttggcctggttgaagagggtgctaagacggcccctaccggaaagcggatagacgaccactttccaaaaagaaagaaggctcggaccgaagaggactccaagccttccacctcgtcagacgccgaagctggacccagcggatcccagcagctgcaaatcccagcccaaccagcctcaagtttgggagctgatacaatgtctgcgggaggtggcggcccattgggcgacaataaccaaggtgccgatggagtgggcaatgcctcgggagattggcattgcgattccacgtggatgggggacagagtcgtcaccaagtccacccgaacctgggtgctgcccagctacaacaaccaccagtaccgagagatcaaaagcggctccgtcgacggaagcaacgccaacgcctactttggatacagcaccccctgggggtactttgactttaaccgcttccacagccactggagcccccgagactggcaaagactcatcaacaactactggggcttcagaccccggtccctcagagtcaaaatcttcaacattcaagtcaaagaggtcacggtgcaggactccaccaccaccatcgccaacaacctcacctccaccgtccaagtgtttacggacgacgactaccagctgccctacgtcgtcggcaacgggaccgagggatgcctgccggccttccctccgcaggtctttacgctgccgcagtacggttacgcgacgctgaaccgcgacaacacagaaaatcccaccgagaggagcagcttcttctgcctagagtactttcccagcaagatgctgagaacgggcaacaactttgagtttacctacaactttgaggaggtgcccttccactccagcttcgctcccagtcagaacctgttcaagctggccaacccgctggtggaccagtacttgtaccgcttcgtgagcacaaataacactggcggagtccagttcaacaagaacctggccgggagatacgccaacacctacaaaaactggttcccggggcccatgggccgaacccagggctggaacctgggctccggggtcaaccgcgccagtgtcagcgccttcgccacgaccaataggatggagctcgagggcgcgagttaccaggtgcccccgcagccgaacggcatgaccaacaacctccagggcagcaacacctatgccctggagaacactatgatcttcaacagccagccggcgaacccgggcaccaccgccacgtacctcgagggcaacatgctcatcaccagcgagagcgagacacagccggtgaaccgcgtggcgtacaacgtcggcgggcagatggccaccaacaaccagagctccaccactgcccccgcgaccggcacgtacaacctccaggaaatcgtgcccggcagcgtgtggatggagagggacgtgtacctccaaggacccatctgggccaagatcccagagacaggggcgcactttcacccctctccggccatgggcggattcggactcaaacacccaccgcccatgatgctcatcaagaacacgcctgtgcccggaaatatcaccagcttctcggacgtgcccgtcagcagcttcatcacccagtacagcaccgggcaggtcaccgtggagatggagtgggagctcaagaaggaaaactccaagaggtggaacccagagatccagtacacaaacaactacaacgacccccagtttgtggactttgccccggacagcaccggggaatacagaaccaccagacctatcggaacccgataccttacccgacccctttaa

SEQ ID NO: 247 - protein, 118 aa, Artificial Sequence
  synthetic sequence
LAHRNQNPISSIKIKPVVLCCLVITISDPETGSIEESLSTGQTRSRESTTSRTTSSLRRETTPTSSTTTRTPSFRRSSPTTHPSGETSERQSFRPRKGFSNLLAWLKRVLRRPLPESG

SEQ ID NO: 248 - DNA, 357 bp, Artificial Sequence
  synthetic sequence
ctggcccaccgaaaccaaaacccaatcagcagcatcaagatcaagcccgtggtcttgtgctgcctggttataactatctcggacccggaaacgggctcgatcgaggagagcctgtcaacagggcagacgaggtcgcgcgagagcacgacatctcgtacaacgagcagcttgaggcgggagacaacccctacctcaagtacaaccacgcggacgccgagtttcaggagaagctcgccgacgacacatccttcgggggaaacctcggaaaggcagtctttcaggccaagaaaagggttctcgaaccttttggcctggttgaagagggtgctaagacggcccctaccggaaagcggatag

SEQ ID NO: 249 - protein, 724 aa, Artificial Sequence
  synthetic sequence
MSFVDHPPDWLEEVGEGLREFLGLEAGPPKPKPNQQHQDQARGLVLPGYNYLGPGNGLDRGEPVNRADEVAREHDISYDEQLEAGDNPYLKYNHADAEFQEKLADDTSFGGNLGKAVFQAKKRVLEPFGLVEEGAKTAPTGKRIDDHFPKRKKARTEEDSKPSTSSDAEAGPSGSQQLQIPAQPASSLGADTMSAGGGGPLGDNNQGADGVGNASGDWHCDSTWMGDRVVTKSTRTWVLPSYNNHQYREIKSGSVDGSNANAYFGYSTPWGYFDFNRFHSHWSPRDWQRLINNYWGFRPRSLRVKIFNIQVKEVTVQDSTTTIANNLTSTVQVFTDDDYQLPYVVGNGTEGCLPAFPPQVFTLPQYGYATLNRDNTENPTERSSFFCLEYFPSKMLRTGNNFEFTYNFEEVPFHSSFAPSQNLFKLANPLVDQYLYRFVSTNNTGGVQFNKNLAGRYANTYKNWFPGPMGRTQGWNLGSGVNRASVSAFATTNRMELEGASYQVPPQPNGMTNNLQGSNTYALENTMIFNSQPANPGTTATYLEGNMLITSESETQPVNRVAYNVGGQMATNNQSSTTAPATGTYNLQEIVPGSVWMERDVYLQGPIWAKIPETGAHFHPSPAMGGFGLKHPPPMMLIKNTPVPGNITSFSDVPVSSFITQYSTGQVTVEMEWELKKENSKRWNPEIQYTNNYNDPQFVDFAPDSTGEYRTTRPIGTRYLTRPL

SEQ ID NO: 250 - DNA, 2175 bp, Artificial Sequence
  synthetic sequence
atgtcttttgttgatcaccctccagattggttggaagaagttggtgaaggtcttcgcgagtttttgggccttgaagcgggcccaccgaaaccaaaacccaatcagcagcatcaagatcaagcccgtggtcttgtgctgcctggttataactatctcggacccggaaacgggctcgatcgaggagagcctgtcaacagggcagacgaggtcgcgcgagagcacgacatctcgtacgatgagcagcttgaggcgggagacaacccctacctcaagtacaaccacgcggacgccgagtttcaggagaagctcgccgacgacacatccttcgggggaaacctcggaaaggcagtctttcaggccaagaaaagggttctcgaaccttttggcctggttgaagagggtgctaagacggcccctaccggaaagcggatagacgaccactttccaaaaagaaagaaggctcggaccgaagaggactccaagccttccacctcgtcagacgccgaagctggacccagcggatcccagcagctgcaaatcccagcccaaccagcctcaagtttgggagctgatacaatgtctgcgggaggtggcggcccattgggcgacaataaccaaggtgccgatggagtgggcaatgcctcgggagattggcattgcgattccacgtggatgggggacagagtcgtcaccaagtccacccgaacctgggtgctgcccagctacaacaaccaccagtaccgagagatcaaaagcggctccgtcgacggaagcaacgccaacgcctactttggatacagcaccccctgggggtactttgactttaaccgcttccacagccactggagcccccgagactggcaaagactcatcaacaactactggggcttcagaccccggtccctcagagtcaaaatcttcaacattcaagtcaaagaggtcacggtgcaggactccaccaccaccatcgccaacaacctcacctccaccgtccaagtgtttacggacgacgactaccagctgccctacgtcgtcggcaacgggaccgagggatgcctgccggccttccctccgcaggtctttacgctgccgcagtacggttacgcgacgctgaaccgcgacaacacagaaaatcccaccgagaggagcagcttcttctgcctagagtactttcccagcaagatgctgagaacgggcaacaactttgagtttacctacaactttgaggaggtgcccttccactccagcttcgctcccagtcagaacctgttcaagctggccaacccgctggtggaccagtacttgtaccgcttcgtgagcacaaataacactggcggagtccagttcaacaagaacctggccgggagatacgccaacacctacaaaaactggttcccggggcccatgggccgaacccagggctggaacctgggctccggggtcaaccgcgccagtgtcagcgccttcgccacgaccaataggatggagctcgagggcgcgagttaccaggtgcccccgcagccgaacggcatgaccaacaacctccagggcagcaacacctatgccctggagaacactatgatcttcaacagccagccggcgaacccgggcaccaccgccacgtacctcgagggcaacatgctcatcaccagcgagagcgagacacagccggtgaaccgcgtggcgtacaacgtcggcgggcagatggccaccaacaaccagagctccaccactgcccccgcgaccggcacgtacaacctccaggaaatcgtgcccggcagcgtgtggatggagagggacgtgtacctccaaggacccatctgggccaagatcccagagacaggggcgcactttcacccctctccggccatgggcggattcggactcaaacacccaccgcccatgatgctcatcaagaacacgcctgtgcccggaaatatcaccagcttctcggacgtgcccgtcagcagcttcatcacccagtacagcaccgggcaggtcaccgtggagatggagtgggagctcaagaaggaaaactccaagaggtggaacccagagatccagtacacaaacaactacaacgacccccagtttgtggactttgccccggacagcaccggggaatacagaaccaccagacctatcggaacccgataccttacccgacccctttaa

SEQ ID NO: 251 - protein, 65 aa, Artificial Sequence; identical to SEQ ID NO: 115
  synthetic sequence

SEQ ID NO: 252 - DNA, 198 bp, Artificial Sequence; identical to SEQ ID NO: 116
  synthetic sequence

SEQ ID NO: 253 - protein, 726 aa, Artificial Sequence
  synthetic sequence
MSFVDHPPDWLEEVGEGLREFLGLEAGPPKPKPNQQHQHADQARGLVLPGYNYLGPFNGLDRGEPVNRADEVAREHDISYNEQLEAGDNPYLKYNHADAEFQEKLADDTSFGGNLGKAVFQAKKRVLEPFGLVEEGAKTAPTGKRIDDHFPKRKKARTEEDSKPSTSSDAEAGPSGSQQLQIPAQPASSLGADTMSAGGGGPLGDNNQGADGVGNASGDWHCDSTWMGDRVVTKSTRTWVLPSYNNHQYREIKSGSVDGSNANAYFGYSTPWGYFDFNRFHSHWSPRDWQRLINNYWGFRPRSLRVKIFNIQVKEVTVQDSTTTIANNLTSTVQVFTDDDYQLPYVVGNGTEGCLPAFPPQVFTLPQYGYATLNRDNTENPTERSSFFCLEYFPSKMLRTGNNFEFTYNFEEVPFHSSFAPSQNLFKLANPLVDQYLYRFVSTNNTGGVQFNKNLAGRYANTYKNWFPGPMGRTQGWNLGSGVNRASVSAFATTNRMELEGASYQVPPQPNGMTNNLQGSNTYALENTMIFNSQPANPGTTATYLEGNMLITSESETQPVNRVAYNVGGQMATNNQSSTTAPATGTYNLQEIVPGSVWMERDVYLQGPIWAKIPETGAHFHPSPAMGGFGLKHPPPMMLIKNTPVPGNITSFSDVPVSSFITQYSTGQVTVEMEWELKKENSKRWNPEIQYTNNYNDPQFVDFAPDSTGEYRTTRPIGTRYLTRPL

SEQ ID NO: 254 - DNA, 2181 bp, Artificial Sequence
  synthetic sequence
atgtcttttgttgatcaccctccagattggttggaagaagttggtgaaggtcttcgcgagtttttgggccttgaagcgggcccaccgaaaccaaaacccaatcagcagcatcaacatgccgatcaagcccgtggtcttgtgctgcctggttataactatctcggacccttcaacgggctcgatcgaggagagcctgtcaacagggcagacgaggtcgcgcgagagcacgacatctcgtacaacgagcagcttgaggcgggagacaacccctacctcaagtacaaccacgcggacgccgagtttcaggagaagctcgccgacgacacatccttcgggggaaacctcggaaaggcagtctttcaggccaagaaaagggttctcgaaccttttggcctggttgaagagggtgctaagacggcccctaccggaaagcggatagacgaccactttccaaaaagaaagaaggctcggaccgaagaggactccaagccttccacctcgtcagacgccgaagctggacccagcggatcccagcagctgcaaatcccagcccaaccagcctcaagtttgggagctgatacaatgtctgcgggaggtggcggcccattgggcgacaataaccaaggtgccgatggagtgggcaatgcctcgggagattggcattgcgattccacgtggatgggggacagagtcgtcaccaagtccacccgaacctgggtgctgcccagctacaacaaccaccagtaccgagagatcaaaagcggctccgtcgacggaagcaacgccaacgcctactttggatacagcaccccctgggggtactttgactttaaccgcttccacagccactggagcccccgagactggcaaagactcatcaacaactactggggcttcagaccccggtccctcagagtcaaaatcttcaacattcaagtcaaagaggtcacggtgcaggactccaccaccaccatcgccaacaacctcacctccaccgtccaagtgtttacggacgacgactaccagctgccctacgtcgtcggcaacgggaccgagggatgcctgccggccttccctccgcaggtctttacgctgccgcagtacggttacgcgacgctgaaccgcgacaacacagaaaatcccaccgagaggagcagcttcttctgcctagagtactttcccagcaagatgctgagaacgggcaacaactttgagtttacctacaactttgaggaggtgcccttccactccagcttcgctcccagtcagaacctgttcaagctggccaacccgctggtggaccagtacttgtaccgcttcgtgagcacaaataacactggcggagtccagttcaacaagaacctggccgggagatacgccaacacctacaaaaactggttcccggggcccatgggccgaacccagggctggaacctgggctccggggtcaaccgcgccagtgtcagcgccttcgccacgaccaataggatggagctcgagggcgcgagttaccaggtgcccccgcagccgaacggcatgaccaacaacctccagggcagcaacacctatgccctggagaacactatgatcttcaacagccagccggcgaacccgggcaccaccgccacgtacctcgagggcaacatgctcatcaccagcgagagcgagacacagccggtgaaccgcgtggcgtacaacgtcggcgggcagatggccaccaacaaccagagctccaccactgcccccgcgaccggcacgtacaacctccaggaaatcgtgcccggcagcgtgtggatggagagggacgtgtacctccaaggacccatctgggccaagatcccagagacaggggcgcactttcacccctctccggccatgggcggattcggactcaaacacccaccgcccatgatgctcatcaagaacacgcctgtgcccggaaatatcaccagcttctcggacgtgcccgtcagcagcttcatcacccagtacagcaccgggcaggtcaccgtggagatggagtgggagctcaagaaggaaaactccaagaggtggaacccagagatccagtacacaaacaactacaacgacccccagtttgtggactttgccccggacagcaccggggaatacagaaccaccagacctatcggaacccgataccttacccgacccctttaa

SEQ ID NO: 255 - protein, 107 aa, Artificial Sequence
  synthetic sequence
MPIKPVVLCCLVITISDPSTGSIEESLSTGQTRSRESTTSRTTSSLRRETTPTSSTTTRTPSFRRSSPTTHPSGETSERQSFRPRKGFSNLLAWLKRVLRRPLPESG

SEQ ID NO: 256 - DNA, 324 bp, Artificial Sequence
  synthetic sequence
atgccgatcaagcccgtggtcttgtgctgcctggttataactatctcggacccttcaacgggctcgatcgaggagagcctgtcaacagggcagacgaggtcgcgcgagagcacgacatctcgtacaacgagcagcttgaggcgggagacaacccctacctcaagtacaaccacgcggacgccgagtttcaggagaagctcgccgacgacacatccttcgggggaaacctcggaaaggcagtctttcaggccaagaaaagggttctcgaaccttttggcctggttgaagagggtgctaagacggcccctaccggaaagcggatag

SEQ ID NO: 257 - protein, 725 aa, Artificial Sequence
  synthetic sequence
MSFVDHPPDWLDEEVGEGLREFLGLEAGPPKPKPNQQHQDQARGLVLPGYNYLGPGNGLDRGEPVNRADEVAREHDISYNEQLEAGDNPYLKYNHADAEFQEKLADDTSFGGNLGKAVFQAKKRVLEPFGLVEEGAKTAPTGKRIDDHFPKRKKARTEEDSKPSTSSDAEAGPSGSQQLQIPAQPASSLGADTMSAGGGGPLGDNNQGADGVGNASGDWHCDSTWMGDRVVTKSTRTWVLPSYNNHQYREIKSGSVDGSNANAYFGYSTPWGYFDFNRFHSHWSPRDWQRLINNYWGFRPRSLRVKIFNIQVKEVTVQDSTTTIANNLTSTVQVFTDDDYQLPYVVGNGTEGCLPAFPPQVFTLPQYGYATLNRDNTENPTERSSFFCLEYFPSKMLRTGNNFEFTYNFEEVPFHSSFAPSQNLFKLANPLVDQYLYRFVSTNNTGGVQFNKNLAGRYANTYKNWFPGPMGRTQGWNLGSGVNRASVSAFATTNRMELEGASYQVPPQPNGMTNNLQGSNTYALENTMIFNSQPANPGTTATYLEGNMLITSESETQPVNRVAYNVGGQMATNNQSSTTAPATGTYNLQEIVPGSVWMERDVYLQGPIWAKIPETGAHFHPSPAMGGFGLKHPPPMMLIKNTPVPGNITSFSDVPVSSFITQYSTGQVTVEMEWELKKENSKRWNPEIQYTNNYNDPQFVDFAPDSTGEYRTTRPIGTRYLTRPL

SEQ ID NO: 258 - DNA, 2178 bp, Artificial Sequence
  synthetic sequence
atgtcttttgttgatcaccctccagattggttggatgaagaagttggtgaaggacttcgcgagtttttgggccttgaagcgggcccaccgaaaccaaaacccaatcagcagcatcaagatcaagcccgtggtcttgtgctgcctggttataactatctcggacccggaaacgggctcgatcgaggagagcctgtcaacagggcagacgaggtcgcgcgagagcacgacatctcgtacaacgagcagcttgaggcgggagacaacccctacctcaagtacaaccacgcggacgccgagtttcaggagaagctcgccgacgacacatccttcgggggaaacctcggaaaggcagtctttcaggccaagaaaagggttctcgaaccttttggcctggttgaagagggtgctaagacggcccctaccggaaagcggatagacgaccactttccaaaaagaaagaaggctcggaccgaagaggactccaagccttccacctcgtcagacgccgaagctggacccagcggatcccagcagctgcaaatcccagcccaaccagcctcaagtttgggagctgatacaatgtctgcgggaggtggcggcccattgggcgacaataaccaaggtgccgatggagtgggcaatgcctcgggagattggcattgcgattccacgtggatgggggacagagtcgtcaccaagtccacccgaacctgggtgctgcccagctacaacaaccaccagtaccgagagatcaaaagcggctccgtcgacggaagcaacgccaacgcctactttggatacagcaccccctgggggtactttgactttaaccgcttccacagccactggagcccccgagactggcaaagactcatcaacaactactggggcttcagaccccggtccctcagagtcaaaatcttcaacattcaagtcaaagaggtcacggtgcaggactccaccaccaccatcgccaacaacctcacctccaccgtccaagtgtttacggacgacgactaccagctgccctacgtcgtcggcaacgggaccgagggatgcctgccggccttccctccgcaggtctttacgctgccgcagtacggttacgcgacgctgaaccgcgacaacacagaaaatcccaccgagaggagcagcttcttctgcctagagtactttcccagcaagatgctgagaacgggcaacaactttgagtttacctacaactttgaggaggtgcccttccactccagcttcgctcccagtcagaacctgttcaagctggccaacccgctggtggaccagtacttgtaccgcttcgtgagcacaaataacactggcggagtccagttcaacaagaacctggccgggagatacgccaacacctacaaaaactggttcccggggcccatgggccgaacccagggctggaacctgggctccggggtcaaccgcgccagtgtcagcgccttcgccacgaccaataggatggagctcgagggcgcgagttaccaggtgcccccgcagccgaacggcatgaccaacaacctccagggcagcaacacctatgccctggagaacactatgatcttcaacagccagccggcgaacccgggcaccaccgccacgtacctcgagggcaacatgctcatcaccagcgagagcgagacacagccggtgaaccgcgtggcgtacaacgtcggcgggcagatggccaccaacaaccagagctccaccactgcccccgcgaccggcacgtacaacctccaggaaatcgtgcccggcagcgtgtggatggagagggacgtgtacctccaaggacccatctgggccaagatcccagagacaggggcgcactttcacccctctccggccatgggcggattcggactcaaacacccaccgcccatgatgctcatcaagaacacgcctgtgcccggaaatatcaccagcttctcggacgtgcccgtcagcagcttcatcacccagtacagcaccgggcaggtcaccgtggagatggagtgggagctcaagaaggaaaactccaagaggtggaacccagagatccagtacacaaacaactacaacgacccccagtttgtggactttgccccggacagcaccggggaatacagaaccaccagacctatcggaacccgataccttacccgacccctttaa

SEQ ID NO: 259 - protein, 133 aa, Artificial Sequence
  synthetic sequence
MKKLVKDFASFWALKRAHRNQNPISSIKIKPVVLCCLVITISDPETGSIEESLSTGQTRSRESTTSRTTSSLRRETTPTSSTTTRTPSFRRSSPTTHPSGETSERQSFRPRKGFSNLLAWLKRVLRRPLPESG

SEQ ID NO: 260 - DNA, 402 bp, Artificial Sequence
  synthetic sequence
atgaagaagttggtgaaggacttcgcgagtttttgggccttgaagcgggcccaccgaaaccaaaacccaatcagcagcatcaagatcaagcccgtggtcttgtgctgcctggttataactatctcggacccggaaacgggctcgatcgaggagagcctgtcaacagggcagacgaggtcgcgcgagagcacgacatctcgtacaacgagcagcttgaggcgggagacaacccctacctcaagtacaaccacgcggacgccgagtttcaggagaagctcgccgacgacacatccttcgggggaaacctcggaaaggcagtctttcaggccaagaaaagggttctcgaaccttttggcctggttgaagagggtgctaagacggcccctaccggaaagcggatag

SEQ ID NO: 261 - protein, 724 aa, Artificial Sequence
  synthetic sequence
MSFVDHPPDWLEEVGEGLREFLGLEAGPPKPKPAEQHKDDARGLVLPGYNYLGPGNGLDRGEPVNRADEVAREHDISYNEQLEAGDNPYLKYNHADAEFQEKLADDTSFGGNLGKAVFQAKKRVLEPFGLVEEGAKTAPTGKRIDDHFPKRKKARTEEDSKPSTSSDAEAGPSGSQQLQIPAQPASSLGADTMSAGGGGPLGDNNQGADGVGNASGDWHCDSTWMGDRVVTKSTRTWVLPSYNNHQYREIKSGSVDGSNANAYFGYSTPWGYFDFNRFHSHWSPRDWQRLINNYWGFRPRSLRVKIFNIQVKEVTVQDSTTTIANNLTSTVQVFTDDDYQLPYVVGNGTEGCLPAFPPQVFTLPQYGYATLNRDNTENPTERSSFFCLEYFPSKMLRTGNNFEFTYNFEEVPFHSSFAPSQNLFKLANPLVDQYLYRFVSTNNTGGVQFNKNLAGRYANTYKNWFPGPMGRTQGWNLGSGVNRASVSAFATTNRMELEGASYQVPPQPNGMTNNLQGSNTYALENTMIFNSQPANPGTTATYLEGNMLITSESETQPVNRVAYNVGGQMATNNQSSTTAPATGTYNLQEIVPGSVWMERDVYLQGPIWAKIPETGAHFHPSPAMGGFGLKHPPPMMLIKNTPVPGNITSFSDVPVSSFITQYSTGQVTVEMEWELKKENSKRWNPEIQYTNNYNDPQFVDFAPDSTGEYRTTRPIGTRYLTRPL

SEQ ID NO: 262 - DNA, 2175 bp, Artificial Sequence
  synthetic sequence
atgtcttttgttgatcaccctccagattggttggaagaagttggtgaaggtcttcgcgagtttttgggccttgaagcgggcccaccgaaaccaaaacccgccgagcagcataaggatgacgcccgtggtcttgtgctgcctggttataactatctcggacccggaaacgggctcgatcgaggagagcctgtcaacagggcagacgaggtcgcgcgagagcacgacatctcgtacaacgagcagcttgaggcgggagacaacccctacctcaagtacaaccacgcggacgccgagtttcaggagaagctcgccgacgacacatccttcgggggaaacctcggaaaggcagtctttcaggccaagaaaagggttctcgaaccttttggcctggttgaagagggtgctaagacggcccctaccggaaagcggatagacgaccactttccaaaaagaaagaaggctcggaccgaagaggactccaagccttccacctcgtcagacgccgaagctggacccagcggatcccagcagctgcaaatcccagcccaaccagcctcaagtttgggagctgatacaatgtctgcgggaggtggcggcccattgggcgacaataaccaaggtgccgatggagtgggcaatgcctcgggagattggcattgcgattccacgtggatgggggacagagtcgtcaccaagtccacccgaacctgggtgctgcccagctacaacaaccaccagtaccgagagatcaaaagcggctccgtcgacggaagcaacgccaacgcctactttggatacagcaccccctgggggtactttgactttaaccgcttccacagccactggagcccccgagactggcaaagactcatcaacaactactggggcttcagaccccggtccctcagagtcaaaatcttcaacattcaagtcaaagaggtcacggtgcaggactccaccaccaccatcgccaacaacctcacctccaccgtccaagtgtttacggacgacgactaccagctgccctacgtcgtcggcaacgggaccgagggatgcctgccggccttccctccgcaggtctttacgctgccgcagtacggttacgcgacgctgaaccgcgacaacacagaaaatcccaccgagaggagcagcttcttctgcctagagtactttcccagcaagatgctgagaacgggcaacaactttgagtttacctacaactttgaggaggtgcccttccactccagcttcgctcccagtcagaacctgttcaagctggccaacccgctggtggaccagtacttgtaccgcttcgtgagcacaaataacactggcggagtccagttcaacaagaacctggccgggagatacgccaacacctacaaaaactggttcccggggcccatgggccgaacccagggctggaacctgggctccggggtcaaccgcgccagtgtcagcgccttcgccacgaccaataggatggagctcgagggcgcgagttaccaggtgcccccgcagccgaacggcatgaccaacaacctccagggcagcaacacctatgccctggagaacactatgatcttcaacagccagccggcgaacccgggcaccaccgccacgtacctcgagggcaacatgctcatcaccagcgagagcgagacacagccggtgaaccgcgtggcgtacaacgtcggcgggcagatggccaccaacaaccagagctccaccactgcccccgcgaccggcacgtacaacctccaggaaatcgtgcccggcagcgtgtggatggagagggacgtgtacctccaaggacccatctgggccaagatcccagagacaggggcgcactttcacccctctccggccatgggcggattcggactcaaacacccaccgcccatgatgctcatcaagaacacgcctgtgcccggaaatatcaccagcttctcggacgtgcccgtcagcagcttcatcacccagtacagcaccgggcaggtcaccgtggagatggagtgggagctcaagaaggaaaactccaagaggtggaacccagagatccagtacacaaacaactacaacgacccccagtttgtggactttgccccggacagcaccggggaatacagaaccaccagacctatcggaacccgataccttacccgacccctttaa

SEQ ID NO: 263 - protein, 105 aa, Artificial Sequence
  synthetic sequence
MTPVVLCCLVITISDPETGSIEESLSTGQTRSRESTTSRTTSSLRRETTPTSSTTTRTPSFRRSSPTTHPSGETSERQSFRPRKGFSNLLAWLKRVLRRPLPESG

SEQ ID NO: 264 - DNA, 318 bp, Artificial Sequence
  synthetic sequence
atgacgcccgtggtcttgtgctgcctggttataactatctcggacccggaaacgggctcgatcgaggagagcctgtcaacagggcagacgaggtcgcgcgagagcacgacatctcgtacaacgagcagcttgaggcgggagacaacccctacctcaagtacaaccacgcggacgccgagtttcaggagaagctcgccgacgacacatccttcgggggaaacctcggaaaggcagtctttcaggccaagaaaagggttctcgaaccttttggcctggttgaagagggtgctaagacggcccctaccggaaagcggatag

SEQ ID NO: 265 - protein, 724 aa, Artificial Sequence
  synthetic sequence
MSFVDHPPDWLEEVGEGLREFLGLEAGPPKPKPAERHKDDSRGLVLPGYRYLGPFNGLDKGEPVNEADEVAREHDISYNEQLEAGDNPYLKYNHADAEFQEKLADDTSFGGNLGKAVFQAKKRVLEPFGLVEEGAKTAPTGKRIDDHFPKRKKARTEEDSKPSTSSDAEAGPSGSQQLQIPAQPASSLGADTMSAGGGGPLGDNNQGADGVGNASGDWHCDSTWMGDRVVTKSTRTWVLPSYNNHQYREIKSGSVDGSNANAYFGYSTPWGYFDFNRFHSHWSPRDWQRLINNYWGFRPRSLRVKIFNIQVKEVTVQDSTTTIANNLTSTVQVFTDDDYQLPYVVGNGTEGCLPAFPPQVFTLPQYGYATLNRDNTENPTERSSFFCLEYFPSKMLRTGNNFEFTYNFEEVPFHSSFAPSQNLFKLANPLVDQYLYRFVSTNNTGGVQFNKNLAGRYANTYKNWFPGPMGRTQGWNLGSGVNRASVSAFATTNRMELEGASYQVPPQPNGMTNNLQGSNTYALENTMIFNSQPANPGTTATYLEGNMLITSESETQPVNRVAYNVGGQMATNNQSSTTAPATGTYNLQEIVPGSVWMERDVYLQGPIWAKIPETGAHFHPSPAMGGFGLKHPPPMMLIKNTPVPGNITSFSDVPVSSFITQYSTGQVTVEMEWELKKENSKRWNPEIQYTNNYNDPQFVDFAPDSTGEYRTTRPIGTRYLTRPL

SEQ ID NO: 266 - DNA, 2175 bp, Artificial Sequence
  synthetic sequence
atgtcttttgttgatcaccctccagattggttggaagaagttggtgaaggtcttcgcgagtttttgggccttgaagcgggcccaccgaaaccaaaacccgctgaacgccataaggatgactctcgtggtcttgtgctgcctggttatcgttatctcggacccttcaacgggctcgataaaggagagcctgtcaacgaggcagacgaggtcgcgcgagagcacgacatctcgtacaacgagcagcttgaggcgggagacaacccctacctcaagtacaaccacgcggacgccgagtttcaggagaagctcgccgacgacacatccttcgggggaaacctcggaaaggcagtctttcaggccaagaaaagggttctcgaaccttttggcctggttgaagagggtgctaagacggcccctaccggaaagcggatagacgaccactttccaaaaagaaagaaggctcggaccgaagaggactccaagccttccacctcgtcagacgccgaagctggacccagcggatcccagcagctgcaaatcccagcccaaccagcctcaagtttgggagctgatacaatgtctgcgggaggtggcggcccattgggcgacaataaccaaggtgccgatggagtgggcaatgcctcgggagattggcattgcgattccacgtggatgggggacagagtcgtcaccaagtccacccgaacctgggtgctgcccagctacaacaaccaccagtaccgagagatcaaaagcggctccgtcgacggaagcaacgccaacgcctactttggatacagcaccccctgggggtactttgactttaaccgcttccacagccactggagcccccgagactggcaaagactcatcaacaactactggggcttcagaccccggtccctcagagtcaaaatcttcaacattcaagtcaaagaggtcacggtgcaggactccaccaccaccatcgccaacaacctcacctccaccgtccaagtgtttacggacgacgactaccagctgccctacgtcgtcggcaacgggaccgagggatgcctgccggccttccctccgcaggtctttacgctgccgcagtacggttacgcgacgctgaaccgcgacaacacagaaaatcccaccgagaggagcagcttcttctgcctagagtactttcccagcaagatgctgagaacgggcaacaactttgagtttacctacaactttgaggaggtgcccttccactccagcttcgctcccagtcagaacctgttcaagctggccaacccgctggtggaccagtacttgtaccgcttcgtgagcacaaataacactggcggagtccagttcaacaagaacctggccgggagatacgccaacacctacaaaaactggttcccggggcccatgggccgaacccagggctggaacctgggctccggggtcaaccgcgccagtgtcagcgccttcgccacgaccaataggatggagctcgagggcgcgagttaccaggtgcccccgcagccgaacggcatgaccaacaacctccagggcagcaacacctatgccctggagaacactatgatcttcaacagccagccggcgaacccgggcaccaccgccacgtacctcgagggcaacatgctcatcaccagcgagagcgagacacagccggtgaaccgcgtggcgtacaacgtcggcgggcagatggccaccaacaaccagagctccaccactgcccccgcgaccggcacgtacaacctccaggaaatcgtgcccggcagcgtgtggatggagagggacgtgtacctccaaggacccatctgggccaagatcccagagacaggggcgcactttcacccctctccggccatgggcggattcggactcaaacacccaccgcccatgatgctcatcaagaacacgcctgtgcccggaaatatcaccagcttctcggacgtgcccgtcagcagcttcatcacccagtacagcaccgggcaggtcaccgtggagatggagtgggagctcaagaaggaaaactccaagaggtggaacccagagatccagtacacaaacaactacaacgacccccagtttgtggactttgccccggacagcaccggggaatacagaaccaccagacctatcggaacccgataccttacccgacccctttaa

SEQ ID NO: 267 - protein, 105 aa, Artificial Sequence
  synthetic sequence
MTLVVLCCLVIVISDPSTGSIKESLSTRQTRSRESTTSRTTSSLRRETTPTSSTTTRTPSFRRSSPTTHPSGETSERQSFRPRKGFSNLLAWLKRVLRRPLPESG

SEQ ID NO: 268 - DNA, 318 bp, Artificial Sequence
  synthetic sequence
atgactctcgtggtcttgtgctgcctggttatcgttatctcggacccttcaacgggctcgataaaggagagcctgtcaacgaggcagacgaggtcgcgcgagagcacgacatctcgtacaacgagcagcttgaggcgggagacaacccctacctcaagtacaaccacgcggacgccgagtttcaggagaagctcgccgacgacacatccttcgggggaaacctcggaaaggcagtctttcaggccaagaaaagggttctcgaaccttttggcctggttgaagagggtgctaagacggcccctaccggaaagcggatag

SEQ ID NO: 269 - protein, 727 aa, Artificial Sequence
  synthetic sequence
MSFVDHPPDWLEEVGEGLREFLGLEAGPPKPKPVQQISEKSPGARGLVLPGYNYLGPGNSLDRGEPVNEADEVAREHDISYNEQLEAGDNPYLKYNHADAEFQEKLADDTSFGGNLGKAVFQAKKRVLEPFGLVEEGAKTAPTGKRIDDHFPKRKKARTEEDSKPSTSSDAEAGPSGSQQLQIPAQPASSLGADTMSAGGGGPLGDNNQGADGVGNASGDWHCDSTWMGDRVVTKSTRTWVLPSYNNHQYREIKSGSVDGSNANAYFGYSTPWGYFDFNRFHSHWSPRDWQRLINNYWGFRPRSLRVKIFNIQVKEVTVQDSTTTIANNLTSTVQVFTDDDYQLPYVVGNGTEGCLPAFPPQVFTLPQYGYATLNRDNTENPTERSSFFCLEYFPSKMLRTGNNFEFTYNFEEVPFHSSFAPSQNLFKLANPLVDQYLYRFVSTNNTGGVQFNKNLAGRYANTYKNWFPGPMGRTQGWNLGSGVNRASVSAFATTNRMELEGASYQVPPQPNGMTNNLQGSNTYALENTMIFNSQPANPGTTATYLEGNMLITSESETQPVNRVAYNVGGQMATNNQSSTTAPATGTYNLQEIVPGSVWMERDVYLQGPIWAKIPETGAHFHPSPAMGGFGLKHPPPMMLIKNTPVPGNITSFSDVPVSSFITQYSTGQVTVEMEWELKKENSKRWNPEIQYTNNYNDPQFVDFAPDSTGEYRTTRPIGTRYLTRPL

SEQ ID NO: 270 - DNA, 2184 bp, Artificial Sequence
  synthetic sequence
atgtcttttgttgatcaccctccagattggttggaagaagttggtgaaggtcttcgcgagtttttgggccttgaagcgggcccaccgaaaccaaaacccgtccagcaaatatctgaaaaaagccctggcgcccgtggtcttgtgctgcctggttataactatctcggacccggaaacagcctcgatcgaggagagcctgtcaacgaagcagacgaggtcgcgcgagagcacgacatctcgtacaacgagcagcttgaggcgggagacaacccctacctcaagtacaaccacgcggacgccgagtttcaggagaagctcgccgacgacacatccttcgggggaaacctcggaaaggcagtctttcaggccaagaaaagggttctcgaaccttttggcctggttgaagagggtgctaagacggcccctaccggaaagcggatagacgaccactttccaaaaagaaagaaggctcggaccgaagaggactccaagccttccacctcgtcagacgccgaagctggacccagcggatcccagcagctgcaaatcccagcccaaccagcctcaagtttgggagctgatacaatgtctgcgggaggtggcggcccattgggcgacaataaccaaggtgccgatggagtgggcaatgcctcgggagattggcattgcgattccacgtggatgggggacagagtcgtcaccaagtccacccgaacctgggtgctgcccagctacaacaaccaccagtaccgagagatcaaaagcggctccgtcgacggaagcaacgccaacgcctactttggatacagcaccccctgggggtactttgactttaaccgcttccacagccactggagcccccgagactggcaaagactcatcaacaactactggggcttcagaccccggtccctcagagtcaaaatcttcaacattcaagtcaaagaggtcacggtgcaggactccaccaccaccatcgccaacaacctcacctccaccgtccaagtgtttacggacgacgactaccagctgccctacgtcgtcggcaacgggaccgagggatgcctgccggccttccctccgcaggtctttacgctgccgcagtacggttacgcgacgctgaaccgcgacaacacagaaaatcccaccgagaggagcagcttcttctgcctagagtactttcccagcaagatgctgagaacgggcaacaactttgagtttacctacaactttgaggaggtgcccttccactccagcttcgctcccagtcagaacctgttcaagctggccaacccgctggtggaccagtacttgtaccgcttcgtgagcacaaataacactggcggagtccagttcaacaagaacctggccgggagatacgccaacacctacaaaaactggttcccggggcccatgggccgaacccagggctggaacctgggctccggggtcaaccgcgccagtgtcagcgccttcgccacgaccaataggatggagctcgagggcgcgagttaccaggtgcccccgcagccgaacggcatgaccaacaacctccagggcagcaacacctatgccctggagaacactatgatcttcaacagccagccggcgaacccgggcaccaccgccacgtacctcgagggcaacatgctcatcaccagcgagagcgagacacagccggtgaaccgcgtggcgtacaacgtcggcgggcagatggccaccaacaaccagagctccaccactgcccccgcgaccggcacgtacaacctccaggaaatcgtgcccggcagcgtgtggatggagagggacgtgtacctccaaggacccatctgggccaagatcccagagacaggggcgcactttcacccctctccggccatgggcggattcggactcaaacacccaccgcccatgatgctcatcaagaacacgcctgtgcccggaaatatcaccagcttctcggacgtgcccgtcagcagcttcatcacccagtacagcaccgggcaggtcaccgtggagatggagtgggagctcaagaaggaaaactccaagaggtggaacccagagatccagtacacaaacaactacaacgacccccagtttgtggactttgccccggacagcaccggggaatacagaaccaccagacctatcggaacccgataccttacccgacccctttaa

SEQ ID NO: 271 - protein, 109 aa, Artificial Sequence
  synthetic sequence
LKKALAPVVLCCLVITISDPETASIEESLSTKQTRSRESTTSRTTSSLRRETTPTSSTTTRTPSFRRSSPTTHPSGETSERQSFRPRKGFSNLLAWLKRVLRRPLPESG

SEQ ID NO: 272 - DNA, 330 bp, Artificial Sequence
  synthetic sequence
ctgaaaaaagccctggcgcccgtggtcttgtgctgcctggttataactatctcggacccggaaacagcctcgatcgaggagagcctgtcaacgaagcagacgaggtcgcgcgagagcacgacatctcgtacaacgagcagcttgaggcgggagacaacccctacctcaagtacaaccacgcggacgccgagtttcaggagaagctcgccgacgacacatccttcgggggaaacctcggaaaggcagtctttcaggccaagaaaagggttctcgaaccttttggcctggttgaagagggtgctaagacggcccctaccggaaagcggatag

SEQ ID NO: 273 - protein, 724 aa, Artificial Sequence; identical to SEQ ID NO: 189
  synthetic sequence

SEQ ID NO: 274 - DNA, 2175 bp, Artificial Sequence
  synthetic sequence
atgtcttttgttgatcaccctccagattggttggaagaagttggtgaaggtcttcgcgagtttttgggccttgaagcgggcccaccgaaaccaaaacccaatgaccagcatcaagatcaagcccgtggtcttgtgctgcctggttataactatctcggacccggaaacgggctcgatcgaggagagcctgtcaacagggcagacgaggtcgcgcgagagcacgacatctcgtacaacgagcagcttgaggcgggagacaacccctacctcaagtacaaccacgcggacgccgagtttcaggagaagctcgccgacgacacatccttcgggggaaacctcggaaaggcagtctttcaggccaagaaaagggttctcgaaccttttggcctggttgaagagggtgctaagacggcccctaccggaaagcggatagacgaccactttccaaaaagaaagaaggctcggaccgaagaggactccaagccttccacctcgtcagacgccgaagctggacccagcggatcccagcagctgcaaatcccagcccaaccagcctcaagtttgggagctgatacaatgtctgcgggaggtggcggcccattgggcgacaataaccaaggtgccgatggagtgggcaatgcctcgggagattggcattgcgattccacgtggatgggggacagagtcgtcaccaagtccacccgaacctgggtgctgcccagctacaacaaccaccagtaccgagagatcaaaagcggctccgtcgacggaagcaacgccaacgcctactttggatacagcaccccctgggggtactttgactttaaccgcttccacagccactggagcccccgagactggcaaagactcatcaacaactactggggcttcagaccccggtccctcagagtcaaaatcttcaacattcaagtcaaagaggtcacggtgcaggactccaccaccaccatcgccaacaacctcacctccaccgtccaagtgtttacggacgacgactaccagctgccctacgtcgtcggcaacgggaccgagggatgcctgccggccttccctccgcaggtctttacgctgccgcagtacggttacgcgacgctgaaccgcgacaacacagaaaatcccaccgagaggagcagcttcttctgcctagagtactttcccagcaagatgctgagaacgggcaacaactttgagtttacctacaactttgaggaggtgcccttccactccagcttcgctcccagtcagaacctgttcaagctggccaacccgctggtggaccagtacttgtaccgcttcgtgagcacaaataacactggcggagtccagttcaacaagaacctggccgggagatacgccaacacctacaaaaactggttcccggggcccatgggccgaacccagggctggaacctgggctccggggtcaaccgcgccagtgtcagcgccttcgccacgaccaataggatggagctcgagggcgcgagttaccaggtgcccccgcagccgaacggcatgaccaacaacctccagggcagcaacacctatgccctggagaacactatgatcttcaacagccagccggcgaacccgggcaccaccgccacgtacctcgagggcaacatgctcatcaccagcgagagcgagacacagccggtgaaccgcgtggcgtacaacgtcggcgggcagatggccaccaacaaccagagctccaccactgcccccgcgaccggcacgtacaacctccaggaaatcgtgcccggcagcgtgtggatggagagggacgtgtacctccaaggacccatctgggccaagatcccagagacaggggcgcactttcacccctctccggccatgggcggattcggactcaaacacccaccgcccatgatgctcatcaagaacacgcctgtgcccggaaatatcaccagcttctcggacgtgcccgtcagcagcttcatcacccagtacagcaccgggcaggtcaccgtggagatggagtgggagctcaagaaggaaaactccaagaggtggaacccagagatccagtacacaaacaactacaacgacccccagtttgtggactttgccccggacagcaccggggaatacagaaccaccagacctatcggaacccgataccttacccgacccctttaa

SEQ ID NO: 275 - protein, 110 aa, Artificial Sequence
  synthetic sequence
MTSIKIKPVVLCCLVITISDPETGSIEESLSTGQTRSRESTTSRTTSSLRRETTPTSSTTTRTPSFRRSSPTTHPSGETSERQSFRPRKGFSNLLAWLKRVLRRPLPESG

SEQ ID NO: 276 - DNA, 333 bp, Artificial Sequence
  synthetic sequence
atgaccagcatcaagatcaagcccgtggtcttgtgctgcctggttataactatctcggacccggaaacgggctcgatcgaggagagcctgtcaacagggcagacgaggtcgcgcgagagcacgacatctcgtacaacgagcagcttgaggcgggagacaacccctacctcaagtacaaccacgcggacgccgagtttcaggagaagctcgccgacgacacatccttcgggggaaacctcggaaaggcagtctttcaggccaagaaaagggttctcgaaccttttggcctggttgaagagggtgctaagacggcccctaccggaaagcggatag

SEQ ID NO: 277 - protein, 724 aa, Artificial Sequence
  synthetic sequence
MSFVDHPPDWLEEVGEGLREFLGLPAGPPKPKPNQQHQDQARGLVLPGYNYLGPGNGLDRGEPVNRADEVAREHDISYNEQLEAGDNPYLKYNHADAEFQEKLADDTSFGGNLGKAVFQAKKRVLEPFGLVEEGAKTAPTGKRIDDHFPKRKKARTEEDSKPSTSSDAEAGPSGSQQLQIPAQPASSLGADTMSAGGGGPLGDNNQGADGVGNASGDWHCDSTWMGDRVVTKSTRTWVLPSYNNHQYREIKSGSVDGSNANAYFGYSTPWGYFDFNRFHSHWSPRDWQRLINNYWGFRPRSLRVKIFNIQVKEVTVQDSTTTIANNLTSTVQVFTDDDYQLPYVVGNGTEGCLPAFPPQVFTLPQYGYATLNRDNTENPTERSSFFCLEYFPSKMLRTGNNFEFTYNFEEVPFHSSFAPSQNLFKLANPLVDQYLYRFVSTNNTGGVQFNKNLAGRYANTYKNWFPGPMGRTQGWNLGSGVNRASVSAFATTNRMELEGASYQVPPQPNGMTNNLQGSNTYALENTMIFNSQPANPGTTATYLEGNMLITSESETQPVNRVAYNVGGQMATNNQSSTTAPATGTYNLQEIVPGSVWMERDVYLQGPIWAKIPETGAHFHPSPAMGGFGLKHPPPMMLIKNTPVPGNITSFSDVPVSSFITQYSTGQVTVEMEWELKKENSKRWNPEIQYTNNYNDPQFVDFAPDSTGEYRTTRPIGTRYLTRPL

SEQ ID NO: 278 - DNA, 2175 bp, Artificial Sequence
  synthetic sequence
atgtcttttgttgatcaccctccagattggttggaagaagttggtgaaggccttcgcgagtttttgggccttcctgcgggcccaccgaaaccaaaacccaatcagcagcatcaagatcaagcccgtggtcttgtgctgcctggttataactatctcggacccggaaacgggctcgatcgaggagagcctgtcaacagggcagacgaggtcgcgcgagagcacgacatctcgtacaacgagcagcttgaggcgggagacaacccctacctcaagtacaaccacgcggacgccgagtttcaggagaagctcgccgacgacacatccttcgggggaaacctcggaaaggcagtctttcaggccaagaaaagggttctcgaaccttttggcctggttgaagagggtgctaagacggcccctaccggaaagcggatagacgaccactttccaaaaagaaagaaggctcggaccgaagaggactccaagccttccacctcgtcagacgccgaagctggacccagcggatcccagcagctgcaaatcccagcccaaccagcctcaagtttgggagctgatacaatgtctgcgggaggtggcggcccattgggcgacaataaccaaggtgccgatggagtgggcaatgcctcgggagattggcattgcgattccacgtggatgggggacagagtcgtcaccaagtccacccgaacctgggtgctgcccagctacaacaaccaccagtaccgagagatcaaaagcggctccgtcgacggaagcaacgccaacgcctactttggatacagcaccccctgggggtactttgactttaaccgcttccacagccactggagcccccgagactggcaaagactcatcaacaactactggggcttcagaccccggtccctcagagtcaaaatcttcaacattcaagtcaaagaggtcacggtgcaggactccaccaccaccatcgccaacaacctcacctccaccgtccaagtgtttacggacgacgactaccagctgccctacgtcgtcggcaacgggaccgagggatgcctgccggccttccctccgcaggtctttacgctgccgcagtacggttacgcgacgctgaaccgcgacaacacagaaaatcccaccgagaggagcagcttcttctgcctagagtactttcccagcaagatgctgagaacgggcaacaactttgagtttacctacaactttgaggaggtgcccttccactccagcttcgctcccagtcagaacctgttcaagctggccaacccgctggtggaccagtacttgtaccgcttcgtgagcacaaataacactggcggagtccagttcaacaagaacctggccgggagatacgccaacacctacaaaaactggttcccggggcccatgggccgaacccagggctggaacctgggctccggggtcaaccgcgccagtgtcagcgccttcgccacgaccaataggatggagctcgagggcgcgagttaccaggtgcccccgcagccgaacggcatgaccaacaacctccagggcagcaacacctatgccctggagaacactatgatcttcaacagccagccggcgaacccgggcaccaccgccacgtacctcgagggcaacatgctcatcaccagcgagagcgagacacagccggtgaaccgcgtggcgtacaacgtcggcgggcagatggccaccaacaaccagagctccaccactgcccccgcgaccggcacgtacaacctccaggaaatcgtgcccggcagcgtgtggatggagagggacgtgtacctccaaggacccatctgggccaagatcccagagacaggggcgcactttcacccctctccggccatgggcggattcggactcaaacacccaccgcccatgatgctcatcaagaacacgcctgtgcccggaaatatcaccagcttctcggacgtgcccgtcagcagcttcatcacccagtacagcaccgggcaggtcaccgtggagatggagtgggagctcaagaaggaaaactccaagaggtggaacccagagatccagtacacaaacaactacaacgacccccagtttgtggactttgccccggacagcaccggggaatacagaaccaccagacctatcggaacccgataccttacccgacccctttaa

SEQ ID NO: 279 - protein, 119 aa, Artificial Sequence
  synthetic sequence
LRAHRNQNPISSIKIKPVVLCCLVITISDPETGSIEESLSTGQTRSRESTTSRTTSSLRRETTPTSSTTTRTPSFRRSSPTTHPSGETSERQSFRPRKGFSNLLAWLKRVLRRPLPESG

SEQ ID NO: 280 - DNA, 360 bp, Artificial Sequence
  synthetic sequence
ctgcgggcccaccgaaaccaaaacccaatcagcagcatcaagatcaagcccgtggtcttgtgctgcctggttataactatctcggacccggaaacgggctcgatcgaggagagcctgtcaacagggcagacgaggtcgcgcgagagcacgacatctcgtacaacgagcagcttgaggcgggagacaacccctacctcaagtacaaccacgcggacgccgagtttcaggagaagctcgccgacgacacatccttcgggggaaacctcggaaaggcagtctttcaggccaagaaaagggttctcgaaccttttggcctggttgaagagggtgctaagacggcccctaccggaaagcggatag

SEQ ID NO: 281 - protein, 724 aa, Artificial Sequence
  synthetic sequence
MSFVDHPPDWLEEVGEGLREFLGLEAGPPKPKPNQQHQDQARGLVLPGYVYLGPGNGLHRGVPVNRADEVAREHDISYNEQLEAGDNPYLKYNHADAEFQEKLADDTSFGGNLGKAVFQAKKRVLEPFGLVEEGAKTAPTGKRIDDHFPKRKKARTEEDSKPSTSSDAEAGPSGSQQLQIPAQPASSLGADTMSAGGGGPLGDNNQGADGVGNASGDWHCDSTWMGDRVVTKSTRTWVLPSYNNHQYREIKSGSVDGSNANAYFGYSTPWGYFDFNRFHSHWSPRDWQRLINNYWGFRPRSLRVKIFNIQVKEVTVQDSTTTIANNLTSTVQVFTDDDYQLPYVVGNGTEGCLPAFPPQVFTLPQYGYATLNRDNTENPTERSSFFCLEYFPSKMLRTGNNFEFTYNFEEVPFHSSFAPSQNLFKLANPLVDQYLYRFVSTNNTGGVQFNKNLAGRYANTYKNWFPGPMGRTQGWNLGSGVNRASVSAFATTNRMELEGASYQVPPQPNGMTNNLQGSNTYALENTMIFNSQPANPGTTATYLEGNMLITSESETQPVNRVAYNVGGQMATNNQSSTTAPATGTYNLQEIVPGSVWMERDVYLQGPIWAKIPETGAHFHPSPAMGGFGLKHPPPMMLIKNTPVPGNITSFSDVPVSSFITQYSTGQVTVEMEWELKKENSKRWNPEIQYTNNYNDPQFVDFAPDSTGEYRTTRPIGTRYLTRPL

SEQ ID NO: 282 - DNA, 2175 bp, Artificial Sequence
  synthetic sequence
atgtcttttgttgatcaccctccagattggttggaagaagttggtgaaggtcttcgcgagtttttgggccttgaagcgggcccaccgaaaccaaaacccaatcagcagcatcaagatcaagcccgtggtcttgtgctgcctggttatgtgtatctcggacccggaaacgggctccaccgaggagttcctgtcaacagggcagacgaggtcgcgcgagagcacgacatctcgtacaacgagcagcttgaggcgggagacaacccctacctcaagtacaaccacgcggacgccgagtttcaggagaagctcgccgacgacacatccttcgggggaaacctcggaaaggcagtctttcaggccaagaaaagggttctcgaaccttttggcctggttgaagagggtgctaagacggcccctaccggaaagcggatagacgaccactttccaaaaagaaagaaggctcggaccgaagaggactccaagccttccacctcgtcagacgccgaagctggacccagcggatcccagcagctgcaaatcccagcccaaccagcctcaagtttgggagctgatacaatgtctgcgggaggtggcggcccattgggcgacaataaccaaggtgccgatggagtgggcaatgcctcgggagattggcattgcgattccacgtggatgggggacagagtcgtcaccaagtccacccgaacctgggtgctgcccagctacaacaaccaccagtaccgagagatcaaaagcggctccgtcgacggaagcaacgccaacgcctactttggatacagcaccccctgggggtactttgactttaaccgcttccacagccactggagcccccgagactggcaaagactcatcaacaactactggggcttcagaccccggtccctcagagtcaaaatcttcaacattcaagtcaaagaggtcacggtgcaggactccaccaccaccatcgccaacaacctcacctccaccgtccaagtgtttacggacgacgactaccagctgccctacgtcgtcggcaacgggaccgagggatgcctgccggccttccctccgcaggtctttacgctgccgcagtacggttacgcgacgctgaaccgcgacaacacagaaaatcccaccgagaggagcagcttcttctgcctagagtactttcccagcaagatgctgagaacgggcaacaactttgagtttacctacaactttgaggaggtgcccttccactccagcttcgctcccagtcagaacctgttcaagctggccaacccgctggtggaccagtacttgtaccgcttcgtgagcacaaataacactggcggagtccagttcaacaagaacctggccgggagatacgccaacacctacaaaaactggttcccggggcccatgggccgaacccagggctggaacctgggctccggggtcaaccgcgccagtgtcagcgccttcgccacgaccaataggatggagctcgagggcgcgagttaccaggtgcccccgcagccgaacggcatgaccaacaacctccagggcagcaacacctatgccctggagaacactatgatcttcaacagccagccggcgaacccgggcaccaccgccacgtacctcgagggcaacatgctcatcaccagcgagagcgagacacagccggtgaaccgcgtggcgtacaacgtcggcgggcagatggccaccaacaaccagagctccaccactgcccccgcgaccggcacgtacaacctccaggaaatcgtgcccggcagcgtgtggatggagagggacgtgtacctccaaggacccatctgggccaagatcccagagacaggggcgcactttcacccctctccggccatgggcggattcggactcaaacacccaccgcccatgatgctcatcaagaacacgcctgtgcccggaaatatcaccagcttctcggacgtgcccgtcagcagcttcatcacccagtacagcaccgggcaggtcaccgtggagatggagtgggagctcaagaaggaaaactccaagaggtggaacccagagatccagtacacaaacaactacaacgacccccagtttgtggactttgccccggacagcaccggggaatacagaaccaccagacctatcggaacccgataccttacccgacccctttaa

SEQ ID NO: 283 - protein, 95 aa, Artificial Sequence
  synthetic sequence
MCISDPETGSTEEFLSTGQTRSRESTTSRTTSSLRRETTPTSSTTTRTPSFRRSSPTTHPSGETSERQSFRPRKGFSNLLAWLKRVLRRPLPESG

SEQ ID NO: 284 - DNA, 288 bp, Artificial Sequence
  synthetic sequence
atgtgtatctcggacccggaaacgggctccaccgaggagttcctgtcaacagggcagacgaggtcgcgcgagagcacgacatctcgtacaacgagcagcttgaggcgggagacaacccctacctcaagtacaaccacgcggacgccgagtttcaggagaagctcgccgacgacacatccttcgggggaaacctcggaaaggcagtctttcaggccaagaaaagggttctcgaaccttttggcctggttgaagagggtgctaagacggcccctaccggaaagcggatag

SEQ ID NO: 285 - protein, 724 aa, Artificial Sequence
  synthetic sequence
MSFVDHPPDWLEEVGEGLREFLGLEAGPPKPKPAEQHKDDARGLVLPGYNYLGPFNGLDKGEPVNEADEVAREHDISYNEQLEAGDNPYLKYNHADAEFQEKLADDTSFGGNLGKAVFQAKKRVLEPFGLVEEGAKTAPTGKRIDDHFPKRKKARTEEDSKPSTSSDAEAGPSGSQQLQIPAQPASSLGADTMSAGGGGPLGDNNQGADGVGNASGDWHCDSTWMGDRVVTKSTRTWVLPSYNNHQYREIKSGSVDGSNANAYFGYSTPWGYFDFNRFHSHWSPRDWQRLINNYWGFRPRSLRVKIFNIQVKEVTVQDSTTTIANNLTSTVQVFTDDDYQLPYVVGNGTEGCLPAFPPQVFTLPQYGYATLNRDNTENPTERSSFFCLEYFPSKMLRTGNNFEFTYNFEEVPFHSSFAPSQNLFKLANPLVDQYLYRFVSTNNTGGVQFNKNLAGRYANTYKNWFPGPMGRTQGWNLGSGVNRASVSAFATTNRMELEGASYQVPPQPNGMTNNLQGSNTYALENTMIFNSQPANPGTTATYLEGNMLITSESETQPVNRVAYNVGGQMATNNQSSTTAPATGTYNLQEIVPGSVWMERDVYLQGPIWAKIPETGAHFHPSPAMGGFGLKHPPPMMLIKNTPVPGNITSFSDVPVSSFITQYSTGQVTVEMEWELKKENSKRWNPEIQYTNNYNDPQFVDFAPDSTGEYRTTRPIGTRYLTRPL

SEQ ID NO: 286 - DNA, 2175 bp, Artificial Sequence
  synthetic sequence
atgtcttttgttgatcaccctccagattggttggaagaagttggtgaaggtcttcgcgagtttttgggccttgaagcgggcccaccgaaaccaaaacccgccgaacagcataaggatgacgcccgtggtcttgtgctgcctggttataactatctcggacccttcaacgggctcgataaaggagagcctgtcaacgaagcagacgaggtcgcgcgagagcacgacatctcgtacaacgagcagcttgaggcgggagacaacccctacctcaagtacaaccacgcggacgccgagtttcaggagaagctcgccgacgacacatccttcgggggaaacctcggaaaggcagtctttcaggccaagaaaagggttctcgaaccttttggcctggttgaagagggtgctaagacggcccctaccggaaagcggatagacgaccactttccaaaaagaaagaaggctcggaccgaagaggactccaagccttccacctcgtcagacgccgaagctggacccagcggatcccagcagctgcaaatcccagcccaaccagcctcaagtttgggagctgatacaatgtctgcgggaggtggcggcccattgggcgacaataaccaaggtgccgatggagtgggcaatgcctcgggagattggcattgcgattccacgtggatgggggacagagtcgtcaccaagtccacccgaacctgggtgctgcccagctacaacaaccaccagtaccgagagatcaaaagcggctccgtcgacggaagcaacgccaacgcctactttggatacagcaccccctgggggtactttgactttaaccgcttccacagccactggagcccccgagactggcaaagactcatcaacaactactggggcttcagaccccggtccctcagagtcaaaatcttcaacattcaagtcaaagaggtcacggtgcaggactccaccaccaccatcgccaacaacctcacctccaccgtccaagtgtttacggacgacgactaccagctgccctacgtcgtcggcaacgggaccgagggatgcctgccggccttccctccgcaggtctttacgctgccgcagtacggttacgcgacgctgaaccgcgacaacacagaaaatcccaccgagaggagcagcttcttctgcctagagtactttcccagcaagatgctgagaacgggcaacaactttgagtttacctacaactttgaggaggtgcccttccactccagcttcgctcccagtcagaacctgttcaagctggccaacccgctggtggaccagtacttgtaccgcttcgtgagcacaaataacactggcggagtccagttcaacaagaacctggccgggagatacgccaacacctacaaaaactggttcccggggcccatgggccgaacccagggctggaacctgggctccggggtcaaccgcgccagtgtcagcgccttcgccacgaccaataggatggagctcgagggcgcgagttaccaggtgcccccgcagccgaacggcatgaccaacaacctccagggcagcaacacctatgccctggagaacactatgatcttcaacagccagccggcgaacccgggcaccaccgccacgtacctcgagggcaacatgctcatcaccagcgagagcgagacacagccggtgaaccgcgtggcgtacaacgtcggcgggcagatggccaccaacaaccagagctccaccactgcccccgcgaccggcacgtacaacctccaggaaatcgtgcccggcagcgtgtggatggagagggacgtgtacctccaaggacccatctgggccaagatcccagagacaggggcgcactttcacccctctccggccatgggcggattcggactcaaacacccaccgcccatgatgctcatcaagaacacgcctgtgcccggaaatatcaccagcttctcggacgtgcccgtcagcagcttcatcacccagtacagcaccgggcaggtcaccgtggagatggagtgggagctcaagaaggaaaactccaagaggtggaacccagagatccagtacacaaacaactacaacgacccccagtttgtggactttgccccggacagcaccggggaatacagaaccaccagacctatcggaacccgataccttacccgacccctttaa

SEQ ID NO: 287 - protein, 105 aa, Artificial Sequence
  synthetic sequence
MTPVVLCCLVITISDPSTGSIKESLSTKQTRSRESTTSRTTSSLRRETTPTSSTTTRTPSFRRSSPTTHPSGETSERQSFRPRKGFSNLLAWLKRVLRRPLPESG

SEQ ID NO: 288 - DNA, 318 bp, Artificial Sequence
  synthetic sequence
atgacgcccgtggtcttgtgctgcctggttataactatctcggacccttcaacgggctcgataaaggagagcctgtcaacgaagcagacgaggtcgcgcgagagcacgacatctcgtacaacgagcagcttgaggcgggagacaacccctacctcaagtacaaccacgcggacgccgagtttcaggagaagctcgccgacgacacatccttcgggggaaacctcggaaaggcagtctttcaggccaagaaaagggttctcgaaccttttggcctggttgaagagggtgctaagacggcccctaccggaaagcggatag

SEQ ID NO: 289 - protein, 724 aa, Artificial Sequence
  synthetic sequence
MSFVDHPPDWLEEVGEGLREFLGLEAGPPKPKPAEQHKDDARGLVLPGYKYLGPGNGLDRGEPVNRADEVAREHDISYNEQLEAGDNPYLKYNHADAEFQEKLADDTSFGGNLGKAVFQAKKRVLEPFGLVEEGAKTAPTGKRIDDHFPKRKKARTEEDSKPSTSSDAEAGPSGSQQLQIPAQPASSLGADTMSAGGGGPLGDNNQGADGVGNASGDWHCDSTWMGDRVVTKSTRTWVLPSYNNHQYREIKSGSVDGSNANAYFGYSTPWGYFDFNRFHSHWSPRDWQRLINNYWGFRPRSLRVKIFNIQVKEVTVQDSTTTIANNLTSTVQVFTDDDYQLPYVVGNGTEGCLPAFPPQVFTLPQYGYATLNRDNTENPTERSSFFCLEYFPSKMLRTGNNFEFTYNFEEVPFHSSFAPSQNLFKLANPLVDQYLYRFVSTNNTGGVQFNKNLAGRYANTYKNWFPGPMGRTQGWNLGSGVNRASVSAFATTNRMELEGASYQVPPQPNGMTNNLQGSNTYALENTMIFNSQPANPGTTATYLEGNMLITSESETQPVNRVAYNVGGQMATNNQSSTTAPATGTYNLQEIVPGSVWMERDVYLQGPIWAKIPETGAHFHPSPAMGGFGLKHPPPMMLIKNTPVPGNITSFSDVPVSSFITQYSTGQVTVEMEWELKKENSKRWNPEIQYTNNYNDPQFVDFAPDSTGEYRTTRPIGTRYLTRPL

SEQ ID NO: 290 - DNA, 2175 bp, Artificial Sequence
  synthetic sequence
atgtcttttgttgatcaccctccagattggttggaagaagttggtgaaggtcttcgcgagtttttgggccttgaagcgggcccaccgaaaccaaaacccgccgagcagcataaagatgatgcccgtggtcttgtgctgcctggttataagtatctcggacccggaaacgggctcgatcgaggagagcctgtcaacagggcagacgaggtcgcgcgagagcacgacatctcgtacaacgagcagcttgaggcgggagacaacccctacctcaagtacaaccacgcggacgccgagtttcaggagaagctcgccgacgacacatccttcgggggaaacctcggaaaggcagtctttcaggccaagaaaagggttctcgaaccttttggcctggttgaagagggtgctaagacggcccctaccggaaagcggatagacgaccactttccaaaaagaaagaaggctcggaccgaagaggactccaagccttccacctcgtcagacgccgaagctggacccagcggatcccagcagctgcaaatcccagcccaaccagcctcaagtttgggagctgatacaatgtctgcgggaggtggcggcccattgggcgacaataaccaaggtgccgatggagtgggcaatgcctcgggagattggcattgcgattccacgtggatgggggacagagtcgtcaccaagtccacccgaacctgggtgctgcccagctacaacaaccaccagtaccgagagatcaaaagcggctccgtcgacggaagcaacgccaacgcctactttggatacagcaccccctgggggtactttgactttaaccgcttccacagccactggagcccccgagactggcaaagactcatcaacaactactggggcttcagaccccggtccctcagagtcaaaatcttcaacattcaagtcaaagaggtcacggtgcaggactccaccaccaccatcgccaacaacctcacctccaccgtccaagtgtttacggacgacgactaccagctgccctacgtcgtcggcaacgggaccgagggatgcctgccggccttccctccgcaggtctttacgctgccgcagtacggttacgcgacgctgaaccgcgacaacacagaaaatcccaccgagaggagcagcttcttctgcctagagtactttcccagcaagatgctgagaacgggcaacaactttgagtttacctacaactttgaggaggtgcccttccactccagcttcgctcccagtcagaacctgttcaagctggccaacccgctggtggaccagtacttgtaccgcttcgtgagcacaaataacactggcggagtccagttcaacaagaacctggccgggagatacgccaacacctacaaaaactggttcccggggcccatgggccgaacccagggctggaacctgggctccggggtcaaccgcgccagtgtcagcgccttcgccacgaccaataggatggagctcgagggcgcgagttaccaggtgcccccgcagccgaacggcatgaccaacaacctccagggcagcaacacctatgccctggagaacactatgatcttcaacagccagccggcgaacccgggcaccaccgccacgtacctcgagggcaacatgctcatcaccagcgagagcgagacacagccggtgaaccgcgtggcgtacaacgtcggcgggcagatggccaccaacaaccagagctccaccactgcccccgcgaccggcacgtacaacctccaggaaatcgtgcccggcagcgtgtggatggagagggacgtgtacctccaaggacccatctgggccaagatcccagagacaggggcgcactttcacccctctccggccatgggcggattcggactcaaacacccaccgcccatgatgctcatcaagaacacgcctgtgcccggaaatatcaccagcttctcggacgtgcccgtcagcagcttcatcacccagtacagcaccgggcaggtcaccgtggagatggagtgggagctcaagaaggaaaactccaagaggtggaacccagagatccagtacacaaacaactacaacgacccccagtttgtggactttgccccggacagcaccggggaatacagaaccaccagacctatcggaacccgataccttacccgacccctttaa

SEQ ID NO: 291 - protein, 105 aa, Artificial Sequence
  synthetic sequence
MMPVVLCCLVISISDPETGSIEESLSTGQTRSRESTTSRTTSSLRRETTPTSSTTTRTPSFRRSSPTTHPSGETSERQSFRPRKGFSNLLAWLKRVLRRPLPESG

SEQ ID NO: 292 - DNA, 318 bp, Artificial Sequence
  synthetic sequence
atgatgcccgtggtcttgtgctgcctggttataagtatctcggacccggaaacgggctcgatcgaggagagcctgtcaacagggcagacgaggtcgcgcgagagcacgacatctcgtacaacgagcagcttgaggcgggagacaacccctacctcaagtacaaccacgcggacgccgagtttcaggagaagctcgccgacgacacatccttcgggggaaacctcggaaaggcagtctttcaggccaagaaaagggttctcgaaccttttggcctggttgaagagggtgctaagacggcccctaccggaaagcggatag

SEQ ID NO: 293 - protein, 724 aa, Artificial Sequence
  synthetic sequence
MSFVDHPPDWLEEVGEGLREFLGLEAGPPKPKPNQQHQDDARGLVLPGYNYLGPFNGLDRGEPVNAADEVAREHDISYNEQLEAGDNPYLKYNHADAEFQEKLADDTSFGGNLGKAVFQAKKRVLEPFGLVEEGAKTAPTGKRIDDHFPKRKKARTEEDSKPSTSSDAEAGPSGSQQLQIPAQPASSLGADTMSAGGGGPLGDNNQGADGVGNASGDWHCDSTWMGDRVVTKSTRTWVLPSYNNHQYREIKSGSVDGSNANAYFGYSTPWGYFDFNRFHSHWSPRDWQRLINNYWGFRPRSLRVKIFNIQVKEVTVQDSTTTIANNLTSTVQVFTDDDYQLPYVVGNGTEGCLPAFPPQVFTLPQYGYATLNRDNTENPTERSSFFCLEYFPSKMLRTGNNFEFTYNFEEVPFHSSFAPSQNLFKLANPLVDQYLYRFVSTNNTGGVQFNKNLAGRYANTYKNWFPGPMGRTQGWNLGSGVNRASVSAFATTNRMELEGASYQVPPQPNGMTNNLQGSNTYALENTMIFNSQPANPGTTATYLEGNMLITSESETQPVNRVAYNVGGQMATNNQSSTTAPATGTYNLQEIVPGSVWMERDVYLQGPIWAKIPETGAHFHPSPAMGGFGLKHPPPMMLIKNTPVPGNITSFSDVPVSSFITQYSTGQVTVEMEWELKKENSKRWNPEIQYTNNYNDPQFVDFAPDSTGEYRTTRPIGTRYLTRPL

SEQ ID NO: 294 - DNA, 2175 bp, Artificial Sequence
  synthetic sequence
atgtcttttgttgatcaccctccagattggttggaagaagttggtgaaggtcttcgcgagtttttgggccttgaagcgggcccaccgaaaccaaaacccaatcagcagcatcaagatgatgcccgtggtcttgtgctgcctggttataactatctcggaccctttaacgggctcgatcgaggagagcctgtcaacgccgcagacgaggtcgcgcgagagcacgacatctcgtacaacgagcagcttgaggcgggagacaacccctacctcaagtacaaccacgcggacgccgagtttcaggagaagctcgccgacgacacatccttcgggggaaacctcggaaaggcagtctttcaggccaagaaaagggttctcgaaccttttggcctggttgaagagggtgctaagacggcccctaccggaaagcggatagacgaccactttccaaaaagaaagaaggctcggaccgaagaggactccaagccttccacctcgtcagacgccgaagctggacccagcggatcccagcagctgcaaatcccagcccaaccagcctcaagtttgggagctgatacaatgtctgcgggaggtggcggcccattgggcgacaataaccaaggtgccgatggagtgggcaatgcctcgggagattggcattgcgattccacgtggatgggggacagagtcgtcaccaagtccacccgaacctgggtgctgcccagctacaacaaccaccagtaccgagagatcaaaagcggctccgtcgacggaagcaacgccaacgcctactttggatacagcaccccctgggggtactttgactttaaccgcttccacagccactggagcccccgagactggcaaagactcatcaacaactactggggcttcagaccccggtccctcagagtcaaaatcttcaacattcaagtcaaagaggtcacggtgcaggactccaccaccaccatcgccaacaacctcacctccaccgtccaagtgtttacggacgacgactaccagctgccctacgtcgtcggcaacgggaccgagggatgcctgccggccttccctccgcaggtctttacgctgccgcagtacggttacgcgacgctgaaccgcgacaacacagaaaatcccaccgagaggagcagcttcttctgcctagagtactttcccagcaagatgctgagaacgggcaacaactttgagtttacctacaactttgaggaggtgcccttccactccagcttcgctcccagtcagaacctgttcaagctggccaacccgctggtggaccagtacttgtaccgcttcgtgagcacaaataacactggcggagtccagttcaacaagaacctggccgggagatacgccaacacctacaaaaactggttcccggggcccatgggccgaacccagggctggaacctgggctccggggtcaaccgcgccagtgtcagcgccttcgccacgaccaataggatggagctcgagggcgcgagttaccaggtgcccccgcagccgaacggcatgaccaacaacctccagggcagcaacacctatgccctggagaacactatgatcttcaacagccagccggcgaacccgggcaccaccgccacgtacctcgagggcaacatgctcatcaccagcgagagcgagacacagccggtgaaccgcgtggcgtacaacgtcggcgggcagatggccaccaacaaccagagctccaccactgcccccgcgaccggcacgtacaacctccaggaaatcgtgcccggcagcgtgtggatggagagggacgtgtacctccaaggacccatctgggccaagatcccagagacaggggcgcactttcacccctctccggccatgggcggattcggactcaaacacccaccgcccatgatgctcatcaagaacacgcctgtgcccggaaatatcaccagcttctcggacgtgcccgtcagcagcttcatcacccagtacagcaccgggcaggtcaccgtggagatggagtgggagctcaagaaggaaaactccaagaggtggaacccagagatccagtacacaaacaactacaacgacccccagtttgtggactttgccccggacagcaccggggaatacagaaccaccagacctatcggaacccgataccttacccgacccctttaa

SEQ ID NO: 295 - protein, 105 aa, Artificial Sequence
  synthetic sequence
MMPVVLCCLVITISDPLTGSIEESLSTPQTRSRESTTSRTTSSLRRETTPTSSTTTRTPSFRRSSPTTHPSGETSERQSFRPRKGFSNLLAWLKRVLRRPLPESG

SEQ ID NO: 296 - DNA, 318 bp, Artificial Sequence
  synthetic sequence
atgatgcccgtggtcttgtgctgcctggttataactatctcggaccctttaacgggctcgatcgaggagagcctgtcaacgccgcagacgaggtcgcgcgagagcacgacatctcgtacaacgagcagcttgaggcgggagacaacccctacctcaagtacaaccacgcggacgccgagtttcaggagaagctcgccgacgacacatccttcgggggaaacctcggaaaggcagtctttcaggccaagaaaagggttctcgaaccttttggcctggttgaagagggtgctaagacggcccctaccggaaagcggatag

SEQ ID NO: 297 - protein, 724 aa, Artificial Sequence
  synthetic sequence
MSFVDHPPDWLEEVGEGLREFLGLEAGPPKPKPNQQKQDDARGLVLPGYKYLGPFNGLDRGEPVNEADEVAREHDISYNEQLEAGDNPYLKYNHADAEFQEKLADDTSFGGNLGKAVFQAKKRVLEPFGLVEEGAKTAPTGKRIDDHFPKRKKARTEEDSKPSTSSDAEAGPSGSQQLQIPAQPASSLGADTMSAGGGGPLGDNNQGADGVGNASGDWHCDSTWMGDRVVTKSTRTWVLPSYNNHQYREIKSGSVDGSNANAYFGYSTPWGYFDFNRFHSHWSPRDWQRLINNYWGFRPRSLRVKIFNIQVKEVTVQDSTTTIANNLTSTVQVFTDDDYQLPYVVGNGTEGCLPAFPPQVFTLPQYGYATLNRDNTENPTERSSFFCLEYFPSKMLRTGNNFEFTYNFEEVPFHSSFAPSQNLFKLANPLVDQYLYRFVSTNNTGGVQFNKNLAGRYANTYKNWFPGPMGRTQGWNLGSGVNRASVSAFATTNRMELEGASYQVPPQPNGMTNNLQGSNTYALENTMIFNSQPANPGTTATYLEGNMLITSESETQPVNRVAYNVGGQMATNNQSSTTAPATGTYNLQEIVPGSVWMERDVYLQGPIWAKIPETGAHFHPSPAMGGFGLKHPPPMMLIKNTPVPGNITSFSDVPVSSFITQYSTGQVTVEMEWELKKENSKRWNPEIQYTNNYNDPQFVDFAPDSTGEYRTTRPIGTRYLTRPL

SEQ ID NO: 298 - DNA, 2175 bp, Artificial Sequence
  synthetic sequence
atgtcttttgttgatcaccctccagattggttggaagaagttggtgaaggtcttcgcgagtttttgggccttgaagcgggcccaccgaaaccaaaacccaatcagcagaagcaagatgatgcccgtggtcttgtgctgcctggttataagtatctcggacccttcaacgggctcgatcgaggagagcctgtcaacgaggcagacgaggtcgcgcgagagcacgacatctcgtacaacgagcagcttgaggcgggagacaacccctacctcaagtacaaccacgcggacgccgagtttcaggagaagctcgccgacgacacatccttcgggggaaacctcggaaaggcagtctttcaggccaagaaaagggttctcgaaccttttggcctggttgaagagggtgctaagacggcccctaccggaaagcggatagacgaccactttccaaaaagaaagaaggctcggaccgaagaggactccaagccttccacctcgtcagacgccgaagctggacccagcggatcccagcagctgcaaatcccagcccaaccagcctcaagtttgggagctgatacaatgtctgcgggaggtggcggcccattgggcgacaataaccaaggtgccgatggagtgggcaatgcctcgggagattggcattgcgattccacgtggatgggggacagagtcgtcaccaagtccacccgaacctgggtgctgcccagctacaacaaccaccagtaccgagagatcaaaagcggctccgtcgacggaagcaacgccaacgcctactttggatacagcaccccctgggggtactttgactttaaccgcttccacagccactggagcccccgagactggcaaagactcatcaacaactactggggcttcagaccccggtccctcagagtcaaaatcttcaacattcaagtcaaagaggtcacggtgcaggactccaccaccaccatcgccaacaacctcacctccaccgtccaagtgtttacggacgacgactaccagctgccctacgtcgtcggcaacgggaccgagggatgcctgccggccttccctccgcaggtctttacgctgccgcagtacggttacgcgacgctgaaccgcgacaacacagaaaatcccaccgagaggagcagcttcttctgcctagagtactttcccagcaagatgctgagaacgggcaacaactttgagtttacctacaactttgaggaggtgcccttccactccagcttcgctcccagtcagaacctgttcaagctggccaacccgctggtggaccagtacttgtaccgcttcgtgagcacaaataacactggcggagtccagttcaacaagaacctggccgggagatacgccaacacctacaaaaactggttcccggggcccatgggccgaacccagggctggaacctgggctccggggtcaaccgcgccagtgtcagcgccttcgccacgaccaataggatggagctcgagggcgcgagttaccaggtgcccccgcagccgaacggcatgaccaacaacctccagggcagcaacacctatgccctggagaacactatgatcttcaacagccagccggcgaacccgggcaccaccgccacgtacctcgagggcaacatgctcatcaccagcgagagcgagacacagccggtgaaccgcgtggcgtacaacgtcggcgggcagatggccaccaacaaccagagctccaccactgcccccgcgaccggcacgtacaacctccaggaaatcgtgcccggcagcgtgtggatggagagggacgtgtacctccaaggacccatctgggccaagatcccagagacaggggcgcactttcacccctctccggccatgggcggattcggactcaaacacccaccgcccatgatgctcatcaagaacacgcctgtgcccggaaatatcaccagcttctcggacgtgcccgtcagcagcttcatcacccagtacagcaccgggcaggtcaccgtggagatggagtgggagctcaagaaggaaaactccaagaggtggaacccagagatccagtacacaaacaactacaacgacccccagtttgtggactttgccccggacagcaccggggaatacagaaccaccagacctatcggaacccgataccttacccgacccctttaa

SEQ ID NO: 299 - protein, 105 aa, Artificial Sequence
  synthetic sequence
MMPVVLCCLVISISDPSTGSIEESLSTRQTRSRESTTSRTTSSLRRETTPTSSTTTRTPSFRRSSPTTHPSGETSERQSFRPRKGFSNLLAWLKRVLRRPLPESG

SEQ ID NO: 300 - DNA, 318 bp, Artificial Sequence
  synthetic sequence
atgatgcccgtggtcttgtgctgcctggttataagtatctcggacccttcaacgggctcgatcgaggagagcctgtcaacgaggcagacgaggtcgcgcgagagcacgacatctcgtacaacgagcagcttgaggcgggagacaacccctacctcaagtacaaccacgcggacgccgagtttcaggagaagctcgccgacgacacatccttcgggggaaacctcggaaaggcagtctttcaggccaagaaaagggttctcgaaccttttggcctggttgaagagggtgctaagacggcccctaccggaaagcggatag

SEQ ID NO: 301 - protein, 726 aa, Artificial Sequence
  synthetic sequence
MSFVDHPPDWLEEVGEGLREFLGLEAGPPKPKPNQQIQHADQARGLVLPGYNYLGPFNGLDRGEPVNAADEVAREHDISYNEQLEAGDNPYLKYNHADAEFQEKLADDTSFGGNLGKAVFQAKKRVLEPFGLVEEGAKTAPTGKRIDDHFPKRKKARTEEDSKPSTSSDAEAGPSGSQQLQIPAQPASSLGADTMSAGGGGPLGDNNQGADGVGNASGDWHCDSTWMGDRVVTKSTRTWVLPSYNNHQYREIKSGSVDGSNANAYFGYSTPWGYFDFNRFHSHWSPRDWQRLINNYWGFRPRSLRVKIFNIQVKEVTVQDSTTTIANNLTSTVQVFTDDDYQLPYVVGNGTEGCLPAFPPQVFTLPQYGYATLNRDNTENPTERSSFFCLEYFPSKMLRTGNNFEFTYNFEEVPFHSSFAPSQNLFKLANPLVDQYLYRFVSTNNTGGVQFNKNLAGRYANTYKNWFPGPMGRTQGWNLGSGVNRASVSAFATTNRMELEGASYQVPPQPNGMTNNLQGSNTYALENTMIFNSQPANPGTTATYLEGNMLITSESETQPVNRVAYNVGGQMATNNQSSTTAPATGTYNLQEIVPGSVWMERDVYLQGPIWAKIPETGAHFHPSPAMGGFGLKHPPPMMLIKNTPVPGNITSFSDVPVSSFITQYSTGQVTVEMEWELKKENSKRWNPEIQYTNNYNDPQFVDFAPDSTGEYRTTRPIGTRYLTRPL

SEQ ID NO: 302 - DNA, 2181 bp, Artificial Sequence
  synthetic sequence
atgtcttttgttgatcaccctccagattggttggaagaagttggtgaaggtcttcgcgagtttttgggccttgaagcgggcccaccgaaaccaaaacccaatcagcagatccaacatgcggaccaagcccgtggtcttgtgctgcctggttataactatctcggacccttcaacgggctcgatcgaggagagcctgtcaacgcggcagacgaggtcgcgcgagagcacgacatctcgtacaacgagcagcttgaggcgggagacaacccctacctcaagtacaaccacgcggacgccgagtttcaggagaagctcgccgacgacacatccttcgggggaaacctcggaaaggcagtctttcaggccaagaaaagggttctcgaaccttttggcctggttgaagagggtgctaagacggcccctaccggaaagcggatagacgaccactttccaaaaagaaagaaggctcggaccgaagaggactccaagccttccacctcgtcagacgccgaagctggacccagcggatcccagcagctgcaaatcccagcccaaccagcctcaagtttgggagctgatacaatgtctgcgggaggtggcggcccattgggcgacaataaccaaggtgccgatggagtgggcaatgcctcgggagattggcattgcgattccacgtggatgggggacagagtcgtcaccaagtccacccgaacctgggtgctgcccagctacaacaaccaccagtaccgagagatcaaaagcggctccgtcgacggaagcaacgccaacgcctactttggatacagcaccccctgggggtactttgactttaaccgcttccacagccactggagcccccgagactggcaaagactcatcaacaactactggggcttcagaccccggtccctcagagtcaaaatcttcaacattcaagtcaaagaggtcacggtgcaggactccaccaccaccatcgccaacaacctcacctccaccgtccaagtgtttacggacgacgactaccagctgccctacgtcgtcggcaacgggaccgagggatgcctgccggccttccctccgcaggtctttacgctgccgcagtacggttacgcgacgctgaaccgcgacaacacagaaaatcccaccgagaggagcagcttcttctgcctagagtactttcccagcaagatgctgagaacgggcaacaactttgagtttacctacaactttgaggaggtgcccttccactccagcttcgctcccagtcagaacctgttcaagctggccaacccgctggtggaccagtacttgtaccgcttcgtgagcacaaataacactggcggagtccagttcaacaagaacctggccgggagatacgccaacacctacaaaaactggttcccggggcccatgggccgaacccagggctggaacctgggctccggggtcaaccgcgccagtgtcagcgccttcgccacgaccaataggatggagctcgagggcgcgagttaccaggtgcccccgcagccgaacggcatgaccaacaacctccagggcagcaacacctatgccctggagaacactatgatcttcaacagccagccggcgaacccgggcaccaccgccacgtacctcgagggcaacatgctcatcaccagcgagagcgagacacagccggtgaaccgcgtggcgtacaacgtcggcgggcagatggccaccaacaaccagagctccaccactgcccccgcgaccggcacgtacaacctccaggaaatcgtgcccggcagcgtgtggatggagagggacgtgtacctccaaggacccatctgggccaagatcccagagacaggggcgcactttcacccctctccggccatgggcggattcggactcaaacacccaccgcccatgatgctcatcaagaacacgcctgtgcccggaaatatcaccagcttctcggacgtgcccgtcagcagcttcatcacccagtacagcaccgggcaggtcaccgtggagatggagtgggagctcaagaaggaaaactccaagaggtggaacccagagatccagtacacaaacaactacaacgacccccagtttgtggactttgccccggacagcaccggggaatacagaaccaccagacctatcggaacccgataccttacccgacccctttaa

SEQ ID NO: 303 - protein, 107 aa, Artificial Sequence
  synthetic sequence
MRTKPVVLCCLVITISDPSTGSIEESLSTRQTRSRESTTSRTTSSLRRETTPTSSTTTRTPSFRRSSPTTHPSGETSERQSFRPRKGFSNLLAWLKRVLRRPLPESG

SEQ ID NO: 304 - DNA, 324 bp, Artificial Sequence
  synthetic sequence
atgcggaccaagcccgtggtcttgtgctgcctggttataactatctcggacccttcaacgggctcgatcgaggagagcctgtcaacgcggcagacgaggtcgcgcgagagcacgacatctcgtacaacgagcagcttgaggcgggagacaacccctacctcaagtacaaccacgcggacgccgagtttcaggagaagctcgccgacgacacatccttcgggggaaacctcggaaaggcagtctttcaggccaagaaaagggttctcgaaccttttggcctggttgaagagggtgctaagacggcccctaccggaaagcggatag

SEQ ID NO: 305 - protein, 724 aa, Artificial Sequence
  synthetic sequence
MSFVDHPPDWLEEVGEGLREFLGLEAGPPKPKPNERHKDQARGLVLPGYKYLGPGNGLDRGEPVNRADEVAREHDISYNEQLEAGDNPYLKYNHADAEFQEKLADDTSFGGNLGKAVFQAKKRVLEPFGLVEEGAKTAPTGKRIDDHFPKRKKARTEEDSKPSTSSDAEAGPSGSQQLQIPAQPASSLGADTMSAGGGGPLGDNNQGADGVGNASGDWHCDSTWMGDRVVTKSTRTWVLPSYNNHQYREIKSGSVDGSNANAYFGYSTPWGYFDFNRFHSHWSPRDWQRLINNYWGFRPRSLRVKIFNIQVKEVTVQDSTTTIANNLTSTVQVFTDDDYQLPYVVGNGTEGCLPAFPPQVFTLPQYGYATLNRDNTENPTERSSFFCLEYFPSKMLRTGNNFEFTYNFEEVPFHSSFAPSQNLFKLANPLVDQYLYRFVSTNNTGGVQFNKNLAGRYANTYKNWFPGPMGRTQGWNLGSGVNRASVSAFATTNRMELEGASYQVPPQPNGMTNNLQGSNTYALENTMIFNSQPANPGTTATYLEGNMLITSESETQPVNRVAYNVGGQMATNNQSSTTAPATGTYNLQEIVPGSVWMERDVYLQGPIWAKIPETGAHFHPSPAMGGFGLKHPPPMMLIKNTPVPGNITSFSDVPVSSFITQYSTGQVTVEMEWELKKENSKRWNPEIQYTNNYNDPQFVDFAPDSTGEYRTTRPIGTRYLTRPL

SEQ ID NO: 306 - DNA, 2175 bp, Artificial Sequence
  synthetic sequence
atgtcttttgttgatcaccctccagattggttggaagaagttggtgaaggtcttcgcgagtttttgggccttgaagcgggcccaccgaaaccaaaacccaatgagcgccataaggatcaagcccgtggtcttgtgctgcctggttataagtatctcggacccggaaacgggctcgatcgaggagagcctgtcaacagggcagacgaggtcgcgcgagagcacgacatctcgtacaacgagcagcttgaggcgggagacaacccctacctcaagtacaaccacgcggacgccgagtttcaggagaagctcgccgacgacacatccttcgggggaaacctcggaaaggcagtctttcaggccaagaaaagggttctcgaaccttttggcctggttgaagagggtgctaagacggcccctaccggaaagcggatagacgaccactttccaaaaagaaagaaggctcggaccgaagaggactccaagccttccacctcgtcagacgccgaagctggacccagcggatcccagcagctgcaaatcccagcccaaccagcctcaagtttgggagctgatacaatgtctgcgggaggtggcggcccattgggcgacaataaccaaggtgccgatggagtgggcaatgcctcgggagattggcattgcgattccacgtggatgggggacagagtcgtcaccaagtccacccgaacctgggtgctgcccagctacaacaaccaccagtaccgagagatcaaaagcggctccgtcgacggaagcaacgccaacgcctactttggatacagcaccccctgggggtactttgactttaaccgcttccacagccactggagcccccgagactggcaaagactcatcaacaactactggggcttcagaccccggtccctcagagtcaaaatcttcaacattcaagtcaaagaggtcacggtgcaggactccaccaccaccatcgccaacaacctcacctccaccgtccaagtgtttacggacgacgactaccagctgccctacgtcgtcggcaacgggaccgagggatgcctgccggccttccctccgcaggtctttacgctgccgcagtacggttacgcgacgctgaaccgcgacaacacagaaaatcccaccgagaggagcagcttcttctgcctagagtactttcccagcaagatgctgagaacgggcaacaactttgagtttacctacaactttgaggaggtgcccttccactccagcttcgctcccagtcagaacctgttcaagctggccaacccgctggtggaccagtacttgtaccgcttcgtgagcacaaataacactggcggagtccagttcaacaagaacctggccgggagatacgccaacacctacaaaaactggttcccggggcccatgggccgaacccagggctggaacctgggctccggggtcaaccgcgccagtgtcagcgccttcgccacgaccaataggatggagctcgagggcgcgagttaccaggtgcccccgcagccgaacggcatgaccaacaacctccagggcagcaacacctatgccctggagaacactatgatcttcaacagccagccggcgaacccgggcaccaccgccacgtacctcgagggcaacatgctcatcaccagcgagagcgagacacagccggtgaaccgcgtggcgtacaacgtcggcgggcagatggccaccaacaaccagagctccaccactgcccccgcgaccggcacgtacaacctccaggaaatcgtgcccggcagcgtgtggatggagagggacgtgtacctccaaggacccatctgggccaagatcccagagacaggggcgcactttcacccctctccggccatgggcggattcggactcaaacacccaccgcccatgatgctcatcaagaacacgcctgtgcccggaaatatcaccagcttctcggacgtgcccgtcagcagcttcatcacccagtacagcaccgggcaggtcaccgtggagatggagtgggagctcaagaaggaaaactccaagaggtggaacccagagatccagtacacaaacaactacaacgacccccagtttgtggactttgccccggacagcaccggggaatacagaaccaccagacctatcggaacccgataccttacccgacccctttaa

SEQ ID NO: 307 - protein, 110 aa, Artificial Sequence
  synthetic sequence
MSAIRIKPVVLCCLVISISDPETGSIEESLSTGQTRSRESTTSRTTSSLRRETTPTSSTTTRTPSFRRSSPTTHPSGETSERQSFRPRKGFSNLLAWLKRVLRRPLPESG

SEQ ID NO: 308 - DNA, 333 bp, Artificial Sequence
  synthetic sequence
atgagcgccataaggatcaagcccgtggtcttgtgctgcctggttataagtatctcggacccggaaacgggctcgatcgaggagagcctgtcaacagggcagacgaggtcgcgcgagagcacgacatctcgtacaacgagcagcttgaggcgggagacaacccctacctcaagtacaaccacgcggacgccgagtttcaggagaagctcgccgacgacacatccttcgggggaaacctcggaaaggcagtctttcaggccaagaaaagggttctcgaaccttttggcctggttgaagagggtgctaagacggcccctaccggaaagcggatag

SEQ ID NO: 309 - protein, 724 aa, Artificial Sequence
  synthetic sequence
MSFVDHPPDWLEEVGEGLREFLGLEAGPPKPKPNQQHQDQARGLVLPGYNYLGPGNGLDRGEPVNRADAVAREHDISYDEQLKAGDNPYLRYNHADAEFQEKLADDTSFGGNLGKAVFQAKKRVLEPFGLVEEGAKTAPTGKRIDDHFPKRKKARTEEDSKPSTSSDAEAGPSGSQQLQIPAQPASSLGADTMSAGGGGPLGDNNQGADGVGNASGDWHCDSTWMGDRVVTKSTRTWVLPSYNNHQYREIKSGSVDGSNANAYFGYSTPWGYFDFNRFHSHWSPRDWQRLINNYWGFRPRSLRVKIFNIQVKEVTVQDSTTTIANNLTSTVQVFTDDDYQLPYVVGNGTEGCLPAFPPQVFTLPQYGYATLNRDNTENPTERSSFFCLEYFPSKMLRTGNNFEFTYNFEEVPFHSSFAPSQNLFKLANPLVDQYLYRFVSTNNTGGVQFNKNLAGRYANTYKNWFPGPMGRTQGWNLGSGVNRASVSAFATTNRMELEGASYQVPPQPNGMTNNLQGSNTYALENTMIFNSQPANPGTTATYLEGNMLITSESETQPVNRVAYNVGGQMATNNQSSTTAPATGTYNLQEIVPGSVWMERDVYLQGPIWAKIPETGAHFHPSPAMGGFGLKHPPPMMLIKNTPVPGNITSFSDVPVSSFITQYSTGQVTVEMEWELKKENSKRWNPEIQYTNNYNDPQFVDFAPDSTGEYRTTRPIGTRYLTRPL

SEQ ID NO: 310 - DNA, 2175 bp, Artificial Sequence
  synthetic sequence
atgtcttttgttgatcaccctccagattggttggaagaagttggtgaaggtcttcgcgagtttttgggccttgaagcgggcccaccgaaaccaaaacccaatcagcagcatcaagatcaagcccgtggtcttgtgctgcctggttataactatctcggacccggaaacgggctcgatcgaggagagcctgtcaacagggcagacgcggtcgcgcgagagcacgacatctcgtacgatgagcagcttaaggcgggagacaacccctacctcagatacaaccacgcggacgccgagtttcaggagaagctcgccgacgacacatccttcgggggaaacctcggaaaggcagtctttcaggccaagaaaagggttctcgaaccttttggcctggttgaagagggtgctaagacggcccctaccggaaagcggatagacgaccactttccaaaaagaaagaaggctcggaccgaagaggactccaagccttccacctcgtcagacgccgaagctggacccagcggatcccagcagctgcaaatcccagcccaaccagcctcaagtttgggagctgatacaatgtctgcgggaggtggcggcccattgggcgacaataaccaaggtgccgatggagtgggcaatgcctcgggagattggcattgcgattccacgtggatgggggacagagtcgtcaccaagtccacccgaacctgggtgctgcccagctacaacaaccaccagtaccgagagatcaaaagcggctccgtcgacggaagcaacgccaacgcctactttggatacagcaccccctgggggtactttgactttaaccgcttccacagccactggagcccccgagactggcaaagactcatcaacaactactggggcttcagaccccggtccctcagagtcaaaatcttcaacattcaagtcaaagaggtcacggtgcaggactccaccaccaccatcgccaacaacctcacctccaccgtccaagtgtttacggacgacgactaccagctgccctacgtcgtcggcaacgggaccgagggatgcctgccggccttccctccgcaggtctttacgctgccgcagtacggttacgcgacgctgaaccgcgacaacacagaaaatcccaccgagaggagcagcttcttctgcctagagtactttcccagcaagatgctgagaacgggcaacaactttgagtttacctacaactttgaggaggtgcccttccactccagcttcgctcccagtcagaacctgttcaagctggccaacccgctggtggaccagtacttgtaccgcttcgtgagcacaaataacactggcggagtccagttcaacaagaacctggccgggagatacgccaacacctacaaaaactggttcccggggcccatgggccgaacccagggctggaacctgggctccggggtcaaccgcgccagtgtcagcgccttcgccacgaccaataggatggagctcgagggcgcgagttaccaggtgcccccgcagccgaacggcatgaccaacaacctccagggcagcaacacctatgccctggagaacactatgatcttcaacagccagccggcgaacccgggcaccaccgccacgtacctcgagggcaacatgctcatcaccagcgagagcgagacacagccggtgaaccgcgtggcgtacaacgtcggcgggcagatggccaccaacaaccagagctccaccactgcccccgcgaccggcacgtacaacctccaggaaatcgtgcccggcagcgtgtggatggagagggacgtgtacctccaaggacccatctgggccaagatcccagagacaggggcgcactttcacccctctccggccatgggcggattcggactcaaacacccaccgcccatgatgctcatcaagaacacgcctgtgcccggaaatatcaccagcttctcggacgtgcccgtcagcagcttcatcacccagtacagcaccgggcaggtcaccgtggagatggagtgggagctcaagaaggaaaactccaagaggtggaacccagagatccagtacacaaacaactacaacgacccccagtttgtggactttgccccggacagcaccggggaatacagaaccaccagacctatcggaacccgataccttacccgacccctttaa

SEQ ID NO: 311 - protein, 65 aa, Artificial Sequence
  synthetic sequence
MSSLRRETTPTSDTTTRTPSFRRSSPTTHPSGETSERQSFRPRKGFSNLLAWLKRVLRRPLPESG

SEQ ID NO: 312 - DNA, 198 bp, Artificial Sequence
  synthetic sequence
atgagcagcttaaggcgggagacaacccctacctcagatacaaccacgcggacgccgagtttcaggagaagctcgccgacgacacatccttcgggggaaacctcggaaaggcagtctttcaggccaagaaaagggttctcgaaccttttggcctggttgaagagggtgctaagacggcccctaccggaaagcggatag

SEQ ID NO: 313 - protein, 724 aa, Artificial Sequence
  synthetic sequence
MSFVDHPPDWLEEVGEGLREFLGLEAGPPKPKPNAQHQDQARGLVLPGYNYLGPGNGLDRGEPVNRADEVAREHDISYNEQLEAGDNPYLKYNHADAEFQEKLADDTSFGGNLGKAVFQAKKRVLEPFGLVEEGAKTAPTGKRIDDHFPKRKKARTEEDSKPSTSSDAEAGPSGSQQLQIPAQPASSLGADTMSAGGGGPLGDNNQGADGVGNASGDWHCDSTWMGDRVVTKSTRTWVLPSYNNHQYREIKSGSVDGSNANAYFGYSTPWGYFDFNRFHSHWSPRDWQRLINNYWGFRPRSLRVKIFNIQVKEVTVQDSTTTIANNLTSTVQVFTDDDYQLPYVVGNGTEGCLPAFPPQVFTLPQYGYATLNRDNTENPTERSSFFCLEYFPSKMLRTGNNFEFTYNFEEVPFHSSFAPSQNLFKLANPLVDQYLYRFVSTNNTGGVQFNKNLAGRYANTYKNWFPGPMGRTQGWNLGSGVNRASVSAFATTNRMELEGASYQVPPQPNGMTNNLQGSNTYALENTMIFNSQPANPGTTATYLEGNMLITSESETQPVNRVAYNVGGQMATNNQSSTTAPATGTYNLQEIVPGSVWMERDVYLQGPIWAKIPETGAHFHPSPAMGGFGLKHPPPMMLIKNTPVPGNITSFSDVPVSSFITQYSTGQVTVEMEWELKKENSKRWNPEIQYTNNYNDPQFVDFAPDSTGEYRTTRPIGTRYLTRPL

SEQ ID NO: 314 - DNA, 2175 bp, Artificial Sequence
  synthetic sequence
atgtcttttgttgatcaccctccagattggttggaagaagttggtgaaggtcttcgcgagtttttgggccttgaagcgggcccaccgaaaccaaaacccaatgcacagcatcaagatcaagcccgtggtcttgtgctgcctggttataactatctcggacccggaaacgggctcgatcgaggagagcctgtcaacagggcagacgaggtcgcgcgagagcacgacatctcgtacaacgagcagcttgaggcgggagacaacccctacctcaagtacaaccacgcggacgccgagtttcaggagaagctcgccgacgacacatccttcgggggaaacctcggaaaggcagtctttcaggccaagaaaagggttctcgaaccttttggcctggttgaagagggtgctaagacggcccctaccggaaagcggatagacgaccactttccaaaaagaaagaaggctcggaccgaagaggactccaagccttccacctcgtcagacgccgaagctggacccagcggatcccagcagctgcaaatcccagcccaaccagcctcaagtttgggagctgatacaatgtctgcgggaggtggcggcccattgggcgacaataaccaaggtgccgatggagtgggcaatgcctcgggagattggcattgcgattccacgtggatgggggacagagtcgtcaccaagtccacccgaacctgggtgctgcccagctacaacaaccaccagtaccgagagatcaaaagcggctccgtcgacggaagcaacgccaacgcctactttggatacagcaccccctgggggtactttgactttaaccgcttccacagccactggagcccccgagactggcaaagactcatcaacaactactggggcttcagaccccggtccctcagagtcaaaatcttcaacattcaagtcaaagaggtcacggtgcaggactccaccaccaccatcgccaacaacctcacctccaccgtccaagtgtttacggacgacgactaccagctgccctacgtcgtcggcaacgggaccgagggatgcctgccggccttccctccgcaggtctttacgctgccgcagtacggttacgcgacgctgaaccgcgacaacacagaaaatcccaccgagaggagcagcttcttctgcctagagtactttcccagcaagatgctgagaacgggcaacaactttgagtttacctacaactttgaggaggtgcccttccactccagcttcgctcccagtcagaacctgttcaagctggccaacccgctggtggaccagtacttgtaccgcttcgtgagcacaaataacactggcggagtccagttcaacaagaacctggccgggagatacgccaacacctacaaaaactggttcccggggcccatgggccgaacccagggctggaacctgggctccggggtcaaccgcgccagtgtcagcgccttcgccacgaccaataggatggagctcgagggcgcgagttaccaggtgcccccgcagccgaacggcatgaccaacaacctccagggcagcaacacctatgccctggagaacactatgatcttcaacagccagccggcgaacccgggcaccaccgccacgtacctcgagggcaacatgctcatcaccagcgagagcgagacacagccggtgaaccgcgtggcgtacaacgtcggcgggcagatggccaccaacaaccagagctccaccactgcccccgcgaccggcacgtacaacctccaggaaatcgtgcccggcagcgtgtggatggagagggacgtgtacctccaaggacccatctgggccaagatcccagagacaggggcgcactttcacccctctccggccatgggcggattcggactcaaacacccaccgcccatgatgctcatcaagaacacgcctgtgcccggaaatatcaccagcttctcggacgtgcccgtcagcagcttcatcacccagtacagcaccgggcaggtcaccgtggagatggagtgggagctcaagaaggaaaactccaagaggtggaacccagagatccagtacacaaacaactacaacgacccccagtttgtggactttgccccggacagcaccggggaatacagaaccaccagacctatcggaacccgataccttacccgacccctttaa

SEQ ID NO: 315 - protein, 110 aa, Artificial Sequence
  synthetic sequence
MHSIKIKPVVLCCLVITISDPETGSIEESLSTGQTRSRESTTSRTTSSLRRETTPTSSTTTRTPSFRRSSPTTHPSGETSERQSFRPRKGFSNLLAWLKRVLRRPLPESG

SEQ ID NO: 316 - DNA, 333 bp, Artificial Sequence
  synthetic sequence
atgcacagcatcaagatcaagcccgtggtcttgtgctgcctggttataactatctcggacccggaaacgggctcgatcgaggagagcctgtcaacagggcagacgaggtcgcgcgagagcacgacatctcgtacaacgagcagcttgaggcgggagacaacccctacctcaagtacaaccacgcggacgccgagtttcaggagaagctcgccgacgacacatccttcgggggaaacctcggaaaggcagtctttcaggccaagaaaagggttctcgaaccttttggcctggttgaagagggtgctaagacggcccctaccggaaagcggatag

SEQ ID NO: 317 - protein, 724 aa, Artificial Sequence
  synthetic sequence
MSFVDHPPDWLEEVGEGLREFLGLEAGPPKPKPNQQHQDQARGLVLPGYNYLGPGNGLDRGEPVNAADEVAREHDIAYDEQLKAGDNPYLKYNHADAEFQEKLADDTSFGGNLGKAVFQAKKRVLEPFGLVEEGAKTAPTGKRIDDHFPKRKKARTEEDSKPSTSSDAEAGPSGSQQLQIPAQPASSLGADTMSAGGGGPLGDNNQGADGVGNASGDWHCDSTWMGDRVVTKSTRTWVLPSYNNHQYREIKSGSVDGSNANAYFGYSTPWGYFDFNRFHSHWSPRDWQRLINNYWGFRPRSLRVKIFNIQVKEVTVQDSTTTIANNLTSTVQVFTDDDYQLPYVVGNGTEGCLPAFPPQVFTLPQYGYATLNRDNTENPTERSSFFCLEYFPSKMLRTGNNFEFTYNFEEVPFHSSFAPSQNLFKLANPLVDQYLYRFVSTNNTGGVQFNKNLAGRYANTYKNWFPGPMGRTQGWNLGSGVNRASVSAFATTNRMELEGASYQVPPQPNGMTNNLQGSNTYALENTMIFNSQPANPGTTATYLEGNMLITSESETQPVNRVAYNVGGQMATNNQSSTTAPATGTYNLQEIVPGSVWMERDVYLQGPIWAKIPETGAHFHPSPAMGGFGLKHPPPMMLIKNTPVPGNITSFSDVPVSSFITQYSTGQVTVEMEWELKKENSKRWNPEIQYTNNYNDPQFVDFAPDSTGEYRTTRPIGTRYLTRPL

SEQ ID NO: 318 - DNA, 2175 bp, Artificial Sequence
  synthetic sequence
atgtcttttgttgatcaccctccagattggttggaagaagttggtgaaggtcttcgcgagtttttgggccttgaagcgggcccaccgaaaccaaaacccaatcagcagcatcaagatcaagcccgtggtcttgtgctgcctggttataactatctcggacccggaaacgggctcgatcgaggagagcctgtcaacgctgcagacgaggtcgcgcgagagcacgacatcgcgtacgatgagcagcttaaagcgggagacaacccctacctcaagtacaaccacgcggacgccgagtttcaggagaagctcgccgacgacacatccttcgggggaaacctcggaaaggcagtctttcaggccaagaaaagggttctcgaaccttttggcctggttgaagagggtgctaagacggcccctaccggaaagcggatagacgaccactttccaaaaagaaagaaggctcggaccgaagaggactccaagccttccacctcgtcagacgccgaagctggacccagcggatcccagcagctgcaaatcccagcccaaccagcctcaagtttgggagctgatacaatgtctgcgggaggtggcggcccattgggcgacaataaccaaggtgccgatggagtgggcaatgcctcgggagattggcattgcgattccacgtggatgggggacagagtcgtcaccaagtccacccgaacctgggtgctgcccagctacaacaaccaccagtaccgagagatcaaaagcggctccgtcgacggaagcaacgccaacgcctactttggatacagcaccccctgggggtactttgactttaaccgcttccacagccactggagcccccgagactggcaaagactcatcaacaactactggggcttcagaccccggtccctcagagtcaaaatcttcaacattcaagtcaaagaggtcacggtgcaggactccaccaccaccatcgccaacaacctcacctccaccgtccaagtgtttacggacgacgactaccagctgccctacgtcgtcggcaacgggaccgagggatgcctgccggccttccctccgcaggtctttacgctgccgcagtacggttacgcgacgctgaaccgcgacaacacagaaaatcccaccgagaggagcagcttcttctgcctagagtactttcccagcaagatgctgagaacgggcaacaactttgagtttacctacaactttgaggaggtgcccttccactccagcttcgctcccagtcagaacctgttcaagctggccaacccgctggtggaccagtacttgtaccgcttcgtgagcacaaataacactggcggagtccagttcaacaagaacctggccgggagatacgccaacacctacaaaaactggttcccggggcccatgggccgaacccagggctggaacctgggctccggggtcaaccgcgccagtgtcagcgccttcgccacgaccaataggatggagctcgagggcgcgagttaccaggtgcccccgcagccgaacggcatgaccaacaacctccagggcagcaacacctatgccctggagaacactatgatcttcaacagccagccggcgaacccgggcaccaccgccacgtacctcgagggcaacatgctcatcaccagcgagagcgagacacagccggtgaaccgcgtggcgtacaacgtcggcgggcagatggccaccaacaaccagagctccaccactgcccccgcgaccggcacgtacaacctccaggaaatcgtgcccggcagcgtgtggatggagagggacgtgtacctccaaggacccatctgggccaagatcccagagacaggggcgcactttcacccctctccggccatgggcggattcggactcaaacacccaccgcccatgatgctcatcaagaacacgcctgtgcccggaaatatcaccagcttctcggacgtgcccgtcagcagcttcatcacccagtacagcaccgggcaggtcaccgtggagatggagtgggagctcaagaaggaaaactccaagaggtggaacccagagatccagtacacaaacaactacaacgacccccagtttgtggactttgccccggacagcaccggggaatacagaaccaccagacctatcggaacccgataccttacccgacccctttaa

SEQ ID NO: 319 - protein, 65 aa, Artificial Sequence; identical to SEQ ID NO: 239
  synthetic sequence

SEQ ID NO: 320 - DNA, 198 bp, Artificial Sequence; identical to SEQ ID NO: 240
  synthetic sequence

SEQ ID NO: 321 - protein, 724 aa, Artificial Sequence
  synthetic sequence
MSFVDHPPDWLEEVGEGLREFLGLEAGPPKPKPNQQHQDQARGLVLPGYNYLGPGNGLDRGEPVNRADEVAREHDISYNEQLEAGDNPYLKYNHADAEFQEKLADDTSFGGNLGKAVFQAKKRVLEPFGLVEEGAKTAPTGKRIDDHFPKRKKARTEEDSKPSTSSDAEAGPSGSQQLQIPAQPASSLGADTMSAGGGGPLGDNNQGADGVGNASGDWHCDSTWMGDRVVTKSTRTWVLPSYNNHQYREIKSGSVDGSNANAYFGYSTPWGYFDFNRFHSHWSPRDWQRLINNYWGFRPRSLRVKIFNIQVKEVTVQDSTTTIANNLTSTVQVFTDDDYQLPYVVGNGTEGCLPAFPPQVFTLPQYGYATLNRDNTENPTERSSFFCLEYFPSKMLRTGNNFEFTYNFEEVPFHSSFAPSQNLFKLANPLVDQYLYRFVSTNNTGGVQFNKNLAGRYANTYKNWFPGPMGRTQGWNLGSGVNRASVSAFATTNRMELEGASYQVPPQPNGMTNNLQGSNTYALENTMIFNSQPANPGTTATYLEGNMLITSESETQPVNRVAYNVGGQMATNNQSSTTAPATGTYNLQEIVPGSVWMERDVYLQGPIWAKIPETGAHFHPSPAMGGFGLKHPPPMMLIKNTPVPGNITSFSDVPVSSFITQYSTGQVTVEMEWELKKENSKRWNPEIQYTNNYNDPQFVDFAPDSTGEYRTTRPIGTRYLTRPL

SEQ ID NO: 322 - protein, 588 aa, Artificial Sequence
  synthetic sequence
TAPTGKRIDDHFPKRKKARTEEDSKPSTSSDAEAGPSGSQQLQIPAQPASSLGADTMSAGGGGPLGDNNQGADGVGNASGDWHCDSTWMGDRVVTKSTRTWVLPSYNNHQYREIKSGSVDGSNANAYFGYSTPWGYFDFNRFHSHWSPRDWQRLINNYWGFRPRSLRVKIFNIQVKEVTVQDSTTTIANNLTSTVQVFTDDDYQLPYVVGNGTEGCLPAFPPQVFTLPQYGYATLNRDNTENPTERSSFFCLEYFPSKMLRTGNNFEFTYNFEEVPFHSSFAPSQNLFKLANPLVDQYLYRFVSTNNTGGVQFNKNLAGRYANTYKNWFPGPMGRTQGWNLGSGVNRASVSAFATTNRMELEGASYQVPPQPNGMTNNLQGSNTYALENTMIFNSQPANPGTTATYLEGNMLITSESETQPVNRVAYNVGGQMATNNQSSTTAPATGTYNLQEIVPGSVWMERDVYLQGPIWAKIPETGAHFHPSPAMGGFGLKHPPPMMLIKNTPVPGNITSFSDVPVSSFITQYSTGQVTVEMEWELKKENSKRWNPEIQYTNNYNDPQFVDFAPDSTGEYRTTRPIGTRYLTRPL

SEQ ID NO: 323 - protein, 532 aa, Artificial Sequence
  synthetic sequence
MSAGGGGPLGDNNQGADGVGNASGDWHCDSTWMGDRVVTKSTRTWVLPSYNNHQYREIKSGSVDGSNANAYFGYSTPWGYFDFNRFHSHWSPRDWQRLINNYWGFRPRSLRVKIFNIQVKEVTVQDSTTTIANNLTSTVQVFTDDDYQLPYVVGNGTEGCLPAFPPQVFTLPQYGYATLNRDNTENPTERSSFFCLEYFPSKMLRTGNNFEFTYNFEEVPFHSSFAPSQNLFKLANPLVDQYLYRFVSTNNTGGVQFNKNLAGRYANTYKNWFPGPMGRTQGWNLGSGVNRASVSAFATTNRMELEGASYQVPPQPNGMTNNLQGSNTYALENTMIFNSQPANPGTTATYLEGNMLITSESETQPVNRVAYNVGGQMATNNQSSTTAPATGTYNLQEIVPGSVWMERDVYLQGPIWAKIPETGAHFHPSPAMGGFGLKHPPPMMLIKNTPVPGNITSFSDVPVSSFITQYSTGQVTVEMEWELKKENSKRWNPEIQYTNNYNDPQFVDFAPDSTGEYRTTRPIGTRYLTRPL

SEQ ID NO: 324 - skipped

SEQ ID NO: 325 - protein, 118 aa, Artificial Sequence
  synthetic sequence
RAHRNQNPISSIKIKPVVLCCLVITISDPETGSIEESLSTGQTRSRESTTSRTTSSLRRETTPTSSTTTRTPSFRRSSPTTHPSGETSERQSFRPRKGFSNLLAWLKRVLRRPLPESG

SEQ ID NO: 326 - protein, 201 aa, Artificial Sequence
  synthetic sequence
LDPADPSSCKSQPNQPQVWELIQCLREVAAHWATITKVPMEWAMPREIGIAIPRGWGTESSPSPPEPGCCPATTTTSTERSKAAPSTEATPTPTLDTAPPGGTLTLTASTATGAPETGKDSSTTTGASDPGPSESKSSTFKSKRSRCRTPPPPSPTTSPPPSKCLRTTTTSCPTSSATGPRDACRPSLRRSLRCRSTVTRR

SEQ ID NO: 327 - DNA, 2175 bp, Artificial Sequence
  synthetic sequence
atgtcttttgttgatcaccctccagattggttggaagaagttggtgaaggtcttcgcgagtttttgggccttgaagcgggcccaccgaaaccaaaacccaatcagcagcatcaagatcaagcccgtggtcttgtgctgcctggttataactatctcggacccggaaacgggctcgatcgaggagagcctgtcaacagggcagacgaggtcgcgcgagagcacgacatctcgtacaacgagcagcttgaggcgggagacaacccctacctcaagtacaaccacgcggacgccgagtttcaggagaagctcgccgacgacacatccttcgggggaaacctcggaaaggcagtctttcaggccaagaaaagggttctcgaaccttttggcctggttgaagagggtgctaagacggcccctaccggaaagcggatagacgaccactttccaaaaagaaagaaggctcggaccgaagaggactccaagccttccacctcgtcagacgccgaagctggacccagcggatcccagcagctgcaaatcccagcccaaccagcctcaagtttgggagctgatacaatgtctgcgggaggtggcggcccattgggcgacaataaccaaggtgccgatggagtgggcaatgcctcgggagattggcattgcgattccacgtggatgggggacagagtcgtcaccaagtccacccgaacctgggtgctgcccagctacaacaaccaccagtaccgagagatcaaaagcggctccgtcgacggaagcaacgccaacgcctactttggatacagcaccccctgggggtactttgactttaaccgcttccacagccactggagcccccgagactggcaaagactcatcaacaactactggggcttcagaccccggtccctcagagtcaaaatcttcaacattcaagtcaaagaggtcacggtgcaggactccaccaccaccatcgccaacaacctcacctccaccgtccaagtgtttacggacgacgactaccagctgccctacgtcgtcggcaacgggaccgagggatgcctgccggccttccctccgcaggtctttacgctgccgcagtacggttacgcgacgctgaaccgcgacaacacagaaaatcccaccgagaggagcagcttcttctgcctagagtactttcccagcaagatgctgagaacgggcaacaactttgagtttacctacaactttgaggaggtgcccttccactccagcttcgctcccagtcagaacctgttcaagctggccaacccgctggtggaccagtacttgtaccgcttcgtgagcacaaataacactggcggagtccagttcaacaagaacctggccgggagatacgccaacacctacaaaaactggttcccggggcccatgggccgaacccagggctggaacctgggctccggggtcaaccgcgccagtgtcagcgccttcgccacgaccaataggatggagctcgagggcgcgagttaccaggtgcccccgcagccgaacggcatgaccaacaacctccagggcagcaacacctatgccctggagaacactatgatcttcaacagccagccggcgaacccgggcaccaccgccacgtacctcgagggcaacatgctcatcaccagcgagagcgagacacagccggtgaaccgcgtggcgtacaacgtcggcgggcagatggccaccaacaaccagagctccaccactgcccccgcgaccggcacgtacaacctccaggaaatcgtgcccggcagcgtgtggatggagagggacgtgtacctccaaggacccatctgggccaagatcccagagacaggggcgcactttcacccctctccggccatgggcggattcggactcaaacacccaccgcccatgatgctcatcaagaacacgcctgtgcccggaaatatcaccagcttctcggacgtgcccgtcagcagcttcatcacccagtacagcaccgggcaggtcaccgtggagatggagtgggagctcaagaaggaaaactccaagaggtggaacccagagatccagtacacaaacaactacaacgacccccagtttgtggactttgccccggacagcaccggggaatacagaaccaccagacctatcggaacccgataccttacccgacccctttaa

SEQ ID NO: 328 - DNA, 1767 bp, Artificial Sequence
  synthetic sequence
acggcccctaccggaaagcggatagacgaccactttccaaaaagaaagaaggctcggaccgaagaggactccaagccttccacctcgtcagacgccgaagctggacccagcggatcccagcagctgcaaatcccagcccaaccagcctcaagtttgggagctgatacaatgtctgcgggaggtggcggcccattgggcgacaataaccaaggtgccgatggagtgggcaatgcctcgggagattggcattgcgattccacgtggatgggggacagagtcgtcaccaagtccacccgaacctgggtgctgcccagctacaacaaccaccagtaccgagagatcaaaagcggctccgtcgacggaagcaacgccaacgcctactttggatacagcaccccctgggggtactttgactttaaccgcttccacagccactggagcccccgagactggcaaagactcatcaacaactactggggcttcagaccccggtccctcagagtcaaaatcttcaacattcaagtcaaagaggtcacggtgcaggactccaccaccaccatcgccaacaacctcacctccaccgtccaagtgtttacggacgacgactaccagctgccctacgtcgtcggcaacgggaccgagggatgcctgccggccttccctccgcaggtctttacgctgccgcagtacggttacgcgacgctgaaccgcgacaacacagaaaatcccaccgagaggagcagcttcttctgcctagagtactttcccagcaagatgctgagaacgggcaacaactttgagtttacctacaactttgaggaggtgcccttccactccagcttcgctcccagtcagaacctgttcaagctggccaacccgctggtggaccagtacttgtaccgcttcgtgagcacaaataacactggcggagtccagttcaacaagaacctggccgggagatacgccaacacctacaaaaactggttcccggggcccatgggccgaacccagggctggaacctgggctccggggtcaaccgcgccagtgtcagcgccttcgccacgaccaataggatggagctcgagggcgcgagttaccaggtgcccccgcagccgaacggcatgaccaacaacctccagggcagcaacacctatgccctggagaacactatgatcttcaacagccagccggcgaacccgggcaccaccgccacgtacctcgagggcaacatgctcatcaccagcgagagcgagacacagccggtgaaccgcgtggcgtacaacgtcggcgggcagatggccaccaacaaccagagctccaccactgcccccgcgaccggcacgtacaacctccaggaaatcgtgcccggcagcgtgtggatggagagggacgtgtacctccaaggacccatctgggccaagatcccagagacaggggcgcactttcacccctctccggccatgggcggattcggactcaaacacccaccgcccatgatgctcatcaagaacacgcctgtgcccggaaatatcaccagcttctcggacgtgcccgtcagcagcttcatcacccagtacagcaccgggcaggtcaccgtggagatggagtgggagctcaagaaggaaaactccaagaggtggaacccagagatccagtacacaaacaactacaacgacccccagtttgtggactttgccccggacagcaccggggaatacagaaccaccagacctatcggaacccgataccttacccgacccctttaa

SEQ ID NO: 329 - DNA, 1599 bp, Artificial Sequence
  synthetic sequence
atgtctgcgggaggtggcggcccattgggcgacaataaccaaggtgccgatggagtgggcaatgcctcgggagattggcattgcgattccacgtggatgggggacagagtcgtcaccaagtccacccgaacctgggtgctgcccagctacaacaaccaccagtaccgagagatcaaaagcggctccgtcgacggaagcaacgccaacgcctactttggatacagcaccccctgggggtactttgactttaaccgcttccacagccactggagcccccgagactggcaaagactcatcaacaactactggggcttcagaccccggtccctcagagtcaaaatcttcaacattcaagtcaaagaggtcacggtgcaggactccaccaccaccatcgccaacaacctcacctccaccgtccaagtgtttacggacgacgactaccagctgccctacgtcgtcggcaacgggaccgagggatgcctgccggccttccctccgcaggtctttacgctgccgcagtacggttacgcgacgctgaaccgcgacaacacagaaaatcccaccgagaggagcagcttcttctgcctagagtactttcccagcaagatgctgagaacgggcaacaactttgagtttacctacaactttgaggaggtgcccttccactccagcttcgctcccagtcagaacctgttcaagctggccaacccgctggtggaccagtacttgtaccgcttcgtgagcacaaataacactggcggagtccagttcaacaagaacctggccgggagatacgccaacacctacaaaaactggttcccggggcccatgggccgaacccagggctggaacctgggctccggggtcaaccgcgccagtgtcagcgccttcgccacgaccaataggatggagctcgagggcgcgagttaccaggtgcccccgcagccgaacggcatgaccaacaacctccagggcagcaacacctatgccctggagaacactatgatcttcaacagccagccggcgaacccgggcaccaccgccacgtacctcgagggcaacatgctcatcaccagcgagagcgagacacagccggtgaaccgcgtggcgtacaacgtcggcgggcagatggccaccaacaaccagagctccaccactgcccccgcgaccggcacgtacaacctccaggaaatcgtgcccggcagcgtgtggatggagagggacgtgtacctccaaggacccatctgggccaagatcccagagacaggggcgcactttcacccctctccggccatgggcggattcggactcaaacacccaccgcccatgatgctcatcaagaacacgcctgtgcccggaaatatcaccagcttctcggacgtgcccgtcagcagcttcatcacccagtacagcaccgggcaggtcaccgtggagatggagtgggagctcaagaaggaaaactccaagaggtggaacccagagatccagtacacaaacaactacaacgacccccagtttgtggactttgccccggacagcaccggggaatacagaaccaccagacctatcggaacccgataccttacccgacccctttaa

SEQ ID NO: 330 - skipped

SEQ ID NO: 331 - DNA, 357 bp, Artificial Sequence
  synthetic sequence
cgggcccaccgaaaccaaaacccaatcagcagcatcaagatcaagcccgtggtcttgtgctgcctggttataactatctcggacccggaaacgggctcgatcgaggagagcctgtcaacagggcagacgaggtcgcgcgagagcacgacatctcgtacaacgagcagcttgaggcgggagacaacccctacctcaagtacaaccacgcggacgccgagtttcaggagaagctcgccgacgacacatccttcgggggaaacctcggaaaggcagtctttcaggccaagaaaagggttctcgaaccttttggcctggttgaagagggtgctaagacggcccctaccggaaagcggatag

SEQ ID NO: 332 - DNA, 606 bp, Artificial Sequence
  synthetic sequence
ctggacccagcggatcccagcagctgcaaatcccagcccaaccagcctcaagtttgggagctgatacaatgtctgcgggaggtggcggcccattgggcgacaataaccaaggtgccgatggagtgggcaatgcctcgggagattggcattgcgattccacgtggatgggggacagagtcgtcaccaagtccacccgaacctgggtgctgcccagctacaacaaccaccagtaccgagagatcaaaagcggctccgtcgacggaagcaacgccaacgcctactttggatacagcaccccctgggggtactttgactttaaccgcttccacagccactggagcccccgagactggcaaagactcatcaacaactactggggcttcagaccccggtccctcagagtcaaaatcttcaacattcaagtcaaagaggtcacggtgcaggactccaccaccaccatcgccaacaacctcacctccaccgtccaagtgtttacggacgacgactaccagctgccctacgtcgtcggcaacgggaccgagggatgcctgccggccttccctccgcaggtctttacgctgccgcagtacggttacgcgacgctga

SEQ ID NO: 333 - protein, 536 aa, Artificial Sequence
  synthetic sequence
MPGFYEIVIKVPSDLDEHLPGISDSFVNWVAEKEWELPPDSDMDLNLIEQAPLTVAEKLQRDFLTEWRRVSKAPEALFFVQFEKGESYFHMHVLVETTGVKSMVLGRFLSQIREKLIQRIYRGIEPTLPNWFAVTKTRNGAGGGNKVVDECYIPNYLLPKTQPELQWAWTNMEQYLSACLNLTERKRLVAQHLTHVSQTQEQNKENQNPNSDAPVIRSKTSARYMELVGWLVDKGITSEKQWIQEDQASYISFNAASNSRSQIKAALDNAGKIMSLTKTAPDYLVGQQPVEDISSNRIYKILELNGYDPQYAASVFLGWATKKFGKRNTIWLFGPATTGKTNIAEAIAHTVPFYGCVNWTNENFPFNDCVDKMVIWWEEGKMTAKVVESAKAILGGSKVRVDQKCKSSAQIDPTPVIVTSNTNMCAVIDGNSTTFEHQQPLQDRMFKFELTRRLDHDFGKVTKQEVKDFFRWAKDHVVEVEHEFYVKKGGAKKRPAPSDADISEPKRVRESVAQPSTSDAEASINYADRLARGHSL

SEQ ID NO: 334 - protein, 621 aa, Artificial Sequence
  synthetic sequence
MPGFYEIVIKVPSDLDEHLPGISDSFVNWVAEKEWELPPDSDMDLNLIEQAPLTVAEKLQRDFLTEWRRVSKAPEALFFVQFEKGESYFHMHVLVETTGVKSMVLGRFLSQIREKLIQRIYRGIEPTLPNWFAVTKTRNGAGGGNKVVDECYIPNYLLPKTQPELQWAWTNMEQYLSACLNLTERKRLVAQHLTHVSQTQEQNKENQNPNSDAPVIRSKTSARYMELVGWLVDKGITSEKQWIQEDQASYISFNAASNSRSQIKAALDNAGKIMSLTKTAPDYLVGQQPVEDISSNRIYKILELNGYDPQYAASVFLGWATKKFGKRNTIWLFGPATTGKTNIAEAIAHTVPFYGCVNWTNENFPFNDCVDKMVIWWEEGKMTAKVVESAKAILGGSKVRVDQKCKSSAQIDPTPVIVTSNTNMCAVIDGNSTTFEHQQPLQDRMFKFELTRRLDHDFGKVTKQEVKDFFRWAKDHVVEVEHEFYVKKGGAKKRPAPSDADISEPKRVRESVAQPSTSDAEASINYADRYQNKCSRHVGMNLMLFPCRQCERMNQNSNICFTHGQKDCLECFPVSESQPVSVVKKAYQKLCYIHHIMGKVPDACTACDLVNVDLDDCIFEQ

SEQ ID NO: 335 - protein, 397 aa, Artificial Sequence
  synthetic sequence
MELVGWLVDKGITSEKQWIQEDQASYISFNAASNSRSQIKAALDNAGKIMSLTKTAPDYLVGQQPVEDISSNRIYKILELNGYDPQYAASVFLGWATKKFGKRNTIWLFGPATTGKTNIAEAIAHTVPFYGCVNWTNENFPFNDCVDKMVIWWEEGKMTAKVVESAKAILGGSKVRVDQKCKSSAQIDPTPVIVTSNTNMCAVIDGNSTTFEHQQPLQDRMFKFELTRRLDHDFGKVTKQEVKDFFRWAKDHVVEVEHEFYVKKGGAKKRPAPSDADISEPKRVRESVAQPSTSDAEASINYADRYQNKCSRHVGMNLMLFPCRQCERMNQNSNICFTHGQKDCLECFPVSESQPVSVVKKAYQKLCYIHHIMGKVPDACTACDLVNVDLDDCIFEQ

SEQ ID NO: 336 - protein, 312 aa, Artificial Sequence
  synthetic sequence
MELVGWLVDKGITSEKQWIQEDQASYISFNAASNSRSQIKAALDNAGKIMSLTKTAPDYLVGQQPVEDISSNRIYKILELNGYDPQYAASVFLGWATKKFGKRNTIWLFGPATTGKTNIAEAIAHTVPFYGCVNWTNENFPFNDCVDKMVIWWEEGKMTAKVVESAKAILGGSKVRVDQKCKSSAQIDPTPVIVTSNTNMCAVIDGNSTTFEHQQPLQDRMFKFELTRRLDHDFGKVTKQEVKDFFRWAKDHVVEVEHEFYVKKGGAKKRPAPSDADISEPKRVRESVAQPSTSDAEASINYADRLARGHSL

SEQ ID NO: 337 - DNA, 1932 bp, Artificial Sequence
  synthetic sequence
atgccggggttttacgagattgtgattaaggtccccagcgaccttgacgagcatctgcccggcatttctgacagctttgtgaactgggtggccgagaaggaatgggagttgccgccagattctgacatggatctgaatctgattgagcaggcacccctgaccgtggccgagaagctgcagcgcgactttctgacggaatggcgccgtgtgagtaaggccccggaggcccttttctttgtgcaatttgagaagggagagagctacttccacatgcacgtgctcgtggaaaccaccggggtgaaatccatggttttgggacgtttcctgagtcagattcgcgaaaaactgattcagagaatttaccgcgggatcgagccgactttgccaaactggttcgcggtcacaaagaccagaaatggcgccggaggcgggaacaaggtggtggatgagtgctacatccccaattacttgctccccaaaacccagcctgagctccagtgggcgtggactaatatggaacagtatttaagcgcctgtttgaatctcacggagcgtaaacggttggtggcgcagcatctgacgcacgtgtcgcagacgcaggagcagaacaaagagaatcagaatcccaattctgatgcgccggtgatcagatcaaaaacttcagccaggtacatggagctggtcgggtggctcgtggacaaggggattacctcggagaagcagtggatccaggaggaccaggcctcatacatctccttcaatgcggcctccaactcgcggtcccaaatcaaggctgccttggacaatgcgggaaagattatgagcctgactaaaaccgcccccgactacctggtgggccagcagcccgtggaggacatttccagcaatcggatttataaaattttggaactaaacgggtacgatccccaatatgcggcttccgtctttctgggatgggccacgaaaaagttcggcaagaggaacaccatctggctgtttgggcctgcaactaccgggaagaccaacatcgcggaggccatagcccacactgtgcccttctacgggtgcgtaaactggaccaatgagaactttcccttcaacgactgtgtcgacaagatggtgatctggtgggaggaggggaagatgaccgccaaggtcgtggagtcggccaaagccattctcggaggaagcaaggtgcgcgtggaccagaaatgcaagtcctcggcccagatagacccgactcccgtgatcgtcacctccaacaccaacatgtgcgccgtgattgacgggaactcaacgaccttcgaacaccagcagccgttgcaagaccggatgttcaaatttgaactcacccgccgtctggatcatgactttgggaaggtcaccaagcaggaagtcaaagactttttccggtgggcaaaggatcacgtggttgaggtggagcatgaattctacgtcaaaaagggtggagccaagaaaagacccgcccccagtgacgcagatataagtgagcccaaacgggtgcgcgagtcagttgcgcagccatcgacgtcagacgcggaagcttcgatcaactacgcagacaggtaccaaaacaaatgttctcgtcacgtgggcatgaatctgatgctgtttccctgcagacaatgcgagagaatgaatcagaattcaaatatctgcttcactcacggacagaaagactgtttagagtgctttcccgtgtcagaatctcaacccgtttctgtcgtcaaaaaggcgtatcagaaactgtgctacattcatcatatcatgggaaaggtgccagacgcttgcactgcctgcgatctggtcaatgtggatttggatgactgcatctttgaacaataaatgatttaaatcaggtatggctgccgatggttatcttccagattggctcgaggacactctctctga

SEQ ID NO: 338 - DNA, 1866 bp, Artificial Sequence
  synthetic sequence
atgccggggttttacgagattgtgattaaggtccccagcgaccttgacgagcatctgcccggcatttctgacagctttgtgaactgggtggccgagaaggaatgggagttgccgccagattctgacatggatctgaatctgattgagcaggcacccctgaccgtggccgagaagctgcagcgcgactttctgacggaatggcgccgtgtgagtaaggccccggaggcccttttctttgtgcaatttgagaagggagagagctacttccacatgcacgtgctcgtggaaaccaccggggtgaaatccatggttttgggacgtttcctgagtcagattcgcgaaaaactgattcagagaatttaccgcgggatcgagccgactttgccaaactggttcgcggtcacaaagaccagaaatggcgccggaggcgggaacaaggtggtggatgagtgctacatccccaattacttgctccccaaaacccagcctgagctccagtgggcgtggactaatatggaacagtatttaagcgcctgtttgaatctcacggagcgtaaacggttggtggcgcagcatctgacgcacgtgtcgcagacgcaggagcagaacaaagagaatcagaatcccaattctgatgcgccggtgatcagatcaaaaacttcagccaggtacatggagctggtcgggtggctcgtggacaaggggattacctcggagaagcagtggatccaggaggaccaggcctcatacatctccttcaatgcggcctccaactcgcggtcccaaatcaaggctgccttggacaatgcgggaaagattatgagcctgactaaaaccgcccccgactacctggtgggccagcagcccgtggaggacatttccagcaatcggatttataaaattttggaactaaacgggtacgatccccaatatgcggcttccgtctttctgggatgggccacgaaaaagttcggcaagaggaacaccatctggctgtttgggcctgcaactaccgggaagaccaacatcgcggaggccatagcccacactgtgcccttctacgggtgcgtaaactggaccaatgagaactttcccttcaacgactgtgtcgacaagatggtgatctggtgggaggaggggaagatgaccgccaaggtcgtggagtcggccaaagccattctcggaggaagcaaggtgcgcgtggaccagaaatgcaagtcctcggcccagatagacccgactcccgtgatcgtcacctccaacaccaacatgtgcgccgtgattgacgggaactcaacgaccttcgaacaccagcagccgttgcaagaccggatgttcaaatttgaactcacccgccgtctggatcatgactttgggaaggtcaccaagcaggaagtcaaagactttttccggtgggcaaaggatcacgtggttgaggtggagcatgaattctacgtcaaaaagggtggagccaagaaaagacccgcccccagtgacgcagatataagtgagcccaaacgggtgcgcgagtcagttgcgcagccatcgacgtcagacgcggaagcttcgatcaactacgcagacaggtaccaaaacaaatgttctcgtcacgtgggcatgaatctgatgctgtttccctgcagacaatgcgagagaatgaatcagaattcaaatatctgcttcactcacggacagaaagactgtttagagtgctttcccgtgtcagaatctcaacccgtttctgtcgtcaaaaaggcgtatcagaaactgtgctacattcatcatatcatgggaaaggtgccagacgcttgcactgcctgcgatctggtcaatgtggatttggatgactgcatctttgaacaataa

SEQ ID NO: 339 - DNA, 1194 bp, Artificial Sequence
  synthetic sequence
atggagctggtcgggtggctcgtggacaaggggattacctcggagaagcagtggatccaggaggaccaggcctcatacatctccttcaatgcggcctccaactcgcggtcccaaatcaaggctgccttggacaatgcgggaaagattatgagcctgactaaaaccgcccccgactacctggtgggccagcagcccgtggaggacatttccagcaatcggatttataaaattttggaactaaacgggtacgatccccaatatgcggcttccgtctttctgggatgggccacgaaaaagttcggcaagaggaacaccatctggctgtttgggcctgcaactaccgggaagaccaacatcgcggaggccatagcccacactgtgcccttctacgggtgcgtaaactggaccaatgagaactttcccttcaacgactgtgtcgacaagatggtgatctggtgggaggaggggaagatgaccgccaaggtcgtggagtcggccaaagccattctcggaggaagcaaggtgcgcgtggaccagaaatgcaagtcctcggcccagatagacccgactcccgtgatcgtcacctccaacaccaacatgtgcgccgtgattgacgggaactcaacgaccttcgaacaccagcagccgttgcaagaccggatgttcaaatttgaactcacccgccgtctggatcatgactttgggaaggtcaccaagcaggaagtcaaagactttttccggtgggcaaaggatcacgtggttgaggtggagcatgaattctacgtcaaaaagggtggagccaagaaaagacccgcccccagtgacgcagatataagtgagcccaaacgggtgcgcgagtcagttgcgcagccatcgacgtcagacgcggaagcttcgatcaactacgcagacaggtaccaaaacaaatgttctcgtcacgtgggcatgaatctgatgctgtttccctgcagacaatgcgagagaatgaatcagaattcaaatatctgcttcactcacggacagaaagactgtttagagtgctttcccgtgtcagaatctcaacccgtttctgtcgtcaaaaaggcgtatcagaaactgtgctacattcatcatatcatgggaaaggtgccagacgcttgcactgcctgcgatctggtcaatgtggatttggatgactgcatctttgaacaataa

SEQ ID NO: 340 - DNA, 1260 bp, Artificial Sequence
  synthetic sequence
atggagctggtcgggtggctcgtggacaaggggattacctcggagaagcagtggatccaggaggaccaggcctcatacatctccttcaatgcggcctccaactcgcggtcccaaatcaaggctgccttggacaatgcgggaaagattatgagcctgactaaaaccgcccccgactacctggtgggccagcagcccgtggaggacatttccagcaatcggatttataaaattttggaactaaacgggtacgatccccaatatgcggcttccgtctttctgggatgggccacgaaaaagttcggcaagaggaacaccatctggctgtttgggcctgcaactaccgggaagaccaacatcgcggaggccatagcccacactgtgcccttctacgggtgcgtaaactggaccaatgagaactttcccttcaacgactgtgtcgacaagatggtgatctggtgggaggaggggaagatgaccgccaaggtcgtggagtcggccaaagccattctcggaggaagcaaggtgcgcgtggaccagaaatgcaagtcctcggcccagatagacccgactcccgtgatcgtcacctccaacaccaacatgtgcgccgtgattgacgggaactcaacgaccttcgaacaccagcagccgttgcaagaccggatgttcaaatttgaactcacccgccgtctggatcatgactttgggaaggtcaccaagcaggaagtcaaagactttttccggtgggcaaaggatcacgtggttgaggtggagcatgaattctacgtcaaaaagggtggagccaagaaaagacccgcccccagtgacgcagatataagtgagcccaaacgggtgcgcgagtcagttgcgcagccatcgacgtcagacgcggaagcttcgatcaactacgcagacaggtaccaaaacaaatgttctcgtcacgtgggcatgaatctgatgctgtttccctgcagacaatgcgagagaatgaatcagaattcaaatatctgcttcactcacggacagaaagactgtttagagtgctttcccgtgtcagaatctcaacccgtttctgtcgtcaaaaaggcgtatcagaaactgtgctacattcatcatatcatgggaaaggtgccagacgcttgcactgcctgcgatctggtcaatgtggatttggatgactgcatctttgaacaataaatgatttaaatcaggtatggctgccgatggttatcttccagattggctcgaggacactctctctga

SEQ ID NO: 341 - protein, 735 aa, Artificial Sequence [sequence omitted]

SEQ ID NO: 342 - protein, 598 aa, Artificial Sequence
  synthetic sequence
TAPGKKRPVEHSPVEPDSSSGTGKAGQQPARKRLNFGQTGDADSVPDPQPLGQPPAAPSGLGTNTMATGSGAPMADNNEGADGVGNSSGNWHCDSTWMGDRVITTSTRTWALPTYNNHLYKQISSQSGASNDNHYFGYSTPWGYFDFNRFHCHFSPRDWQRLINNNWGFRPKRLNFKLFNIQVKEVTQNDGTTTIANNLTSTVQVFTDSEYQLPYVLGSAHQGCLPPFPADVFMVPQYGYLTLNNGSQAVGRSSFYCLEYFPSQMLRTGNNFTFSYTFEDVPFHSSYAHSQSLDRLMNPLIDQYLYYLSRTNTPSGTTTQSRLQFSQAGASDIRDQSRNWLPGPCYRQQRVSKTSADNNNSEYSWTGATKYHLNGRDSLVNPGPAMASHKDDEEKFFPQSGVLIFGKQGSEKTNVDIEKVMITDEEEIRTTNPVATEQYGSVSTNLQRGNRQAATADVNTQGVLPGMVWQDRDVYLQGPIWAKIPHTDGHFHPSPLMGGFGLKHPPPQILIKNTPVPANPSTTFSAAKFASFITQYSTGQVSVEIEWELQKENSKRWNPEIQYTSNYNKSVNVDFTVDTNGVYSEPRPIGTRYLTRNL

SEQ ID NO: 343 - protein, 533 aa, Artificial Sequence
  synthetic sequence
MATGSGAPMADNNEGADGVGNSSGNWHCDSTWMGDRVITTSTRTWALPTYNNHLYKQISSQSGASNDNHYFGYSTPWGYFDFNRFHCHFSPRDWQRLINNNWGFRPKRLNFKLFNIQVKEVTQNDGTTTIANNLTSTVQVFTDSEYQLPYVLGSAHQGCLPPFPADVFMVPQYGYLTLNNGSQAVGRSSFYCLEYFPSQMLRTGNNFTFSYTFEDVPFHSSYAHSQSLDRLMNPLIDQYLYYLSRTNTPSGTTTQSRLQFSQAGASDIRDQSRNWLPGPCYRQQRVSKTSADNNNSEYSWTGATKYHLNGRDSLVNPGPAMASHKDDEEKFFPQSGVLIFGKQGSEKTNVDIEKVMITDEEEIRTTNPVATEQYGSVSTNLQRGNRQAATADVNTQGVLPGMVWQDRDVYLQGPIWAKIPHTDGHFHPSPLMGGFGLKHPPPQILIKNTPVPANPSTTFSAAKFASFITQYSTGQVSVEIEWELQKENSKRWNPEIQYTSNYNKSVNVDFTVDTNGVYSEPRPIGTRYLTRNL

SEQ ID NO: 344 - protein, 119 aa, Artificial Sequence
  synthetic sequence
LAHHHQSPQSGIRTTAGVLCFLGTSTSDPSTDSTRESRSTRQTPRPSSTTKPTTGSSTAETTRTSSTTTPTRSFRSALKKIRLLGATSDEQSSRRKRGFLNLWAWLRNLLRRLREKRGR

SEQ ID NO: 345 - protein, 204 aa, Artificial Sequence
  synthetic sequence
LETQTQYLTPSLSDSHQQPPLVWELIRWLQAVAHQWQTITRAPTEWVIPREIGIAIPHGWATESSPPAPEPGPCPPTTTTSTNKFPANQEPRTTITTLATAPLGGILTSTDSTATFHHVTGKDSSTTTGDSDPRDSTSSSLTFKSKRSRRMTVRRRLPITLPARFRCLLTRSTSSRTSSARRIKDASRRSQQTSSWCHSMDTSP

SEQ ID NO: 346 - DNA, 2208 bp, Artificial Sequence
  synthetic sequence
atggctgccgatggttatcttccagattggctcgaggacactctctctgaaggaataagacagtggtggaagctcaaacctggcccaccaccaccaaagcccgcagagcggcataaggacgacagcaggggtcttgtgcttcctgggtacaagtacctcggacccttcaacggactcgacaagggagagccggtcaacgaggcagacgccgcggccctcgagcacgacaaagcctacgaccggcagctcgacagcggagacaacccgtacctcaagtacaaccacgccgacgcggagtttcaggagcgccttaaagaagatacgtcttttgggggcaacctcggacgagcagtcttccaggcgaaaaagagggttcttgaacctctgggcctggttgaggaacctgttaagacggctccgggaaaaaagaggccggtagagcactctcctgtggagccagactcctcctcgggaaccggaaaggcgggccagcagcctgcaagaaaaagattgaattttggtcagactggagacgcagactcagtacctgacccccagcctctcggacagccaccagcagccccctctggtctgggaactaatacgatggctacaggcagtggcgcaccaatggcagacaataacgagggcgccgacggagtgggtaattcctcgggaaattggcattgcgattccacatggatgggcgacagagtcatcaccaccagcacccgaacctgggccctgcccacctacaacaaccacctctacaaacaaatttccagccaatcaggagcctcgaacgacaatcactactttggctacagcaccccttgggggtattttgacttcaacagattccactgccacttttcaccacgtgactggcaaagactcatcaacaacaactggggattccgacccaagagactcaacttcaagctctttaacattcaagtcaaagaggtcacgcagaatgacggtacgacgacgattgccaataaccttaccagcacggttcaggtgtttactgactcggagtaccagctcccgtacgtcctcggctcggcgcatcaaggatgcctcccgccgttcccagcagacgtcttcatggtgccacagtatggatacctcaccctgaacaacgggagtcaggcagtaggacgctcttcattttactgcctggagtactttccttctcagatgctgcgtaccggaaacaactttaccttcagctacacttttgaggacgttcctttccacagcagctacgctcacagccagagtctggaccgtctcatgaatcctctcatcgaccagtacctgtattacttgagcagaacaaacactccaagtggaaccaccacgcagtcaaggcttcagttttctcaggccggagcgagtgacattcgggaccagtctaggaactggcttcctggaccctgttaccgccagcagcgagtatcaaagacatctgcggataacaacaacagtgaatactcgtggactggagctaccaagtaccacctcaatggcagagactctctggtgaatccgggcccggccatggcaagccacaaggacgatgaagaaaagttttttcctcagagcggggttctcatctttgggaagcaaggctcagagaaaacaaatgtggacattgaaaaggtcatgattacagacgaagaggaaatcaggacaaccaatcccgtggctacggagcagtatggttctgtatctaccaacctccagagaggcaacagacaagcagctaccgcagatgtcaacacacaaggcgttcttccaggcatggtctggcaggacagagatgtgtaccttcaggggcccatctgggcaaagattccacacacggacggacattttcacccctctcccctcatgggtggattcggacttaaacaccctcctccacagattctcatcaagaacaccccggtacctgcgaatccttcgaccaccttcagtgcggcaaagtttgcttccttcatcacacagtactccacgggacaggtcagcgtggagatcgagtgggagctgcagaaggaaaacagcaaacgctggaatcccgaaattcagtacacttccaactacaacaagtctgttaatgtggactttactgtggacactaatggcgtgtattcagagcctcgccccattggcaccagatacctgactcgtaatctgtaa

SEQ ID NO: 347 - DNA, 1797 bp, Artificial Sequence
  synthetic sequence
acggctccgggaaaaaagaggccggtagagcactctcctgtggagccagactcctcctcgggaaccggaaaggcgggccagcagcctgcaagaaaaagattgaattttggtcagactggagacgcagactcagtacctgacccccagcctctcggacagccaccagcagccccctctggtctgggaactaatacgatggctacaggcagtggcgcaccaatggcagacaataacgagggcgccgacggagtgggtaattcctcgggaaattggcattgcgattccacatggatgggcgacagagtcatcaccaccagcacccgaacctgggccctgcccacctacaacaaccacctctacaaacaaatttccagccaatcaggagcctcgaacgacaatcactactttggctacagcaccccttgggggtattttgacttcaacagattccactgccacttttcaccacgtgactggcaaagactcatcaacaacaactggggattccgacccaagagactcaacttcaagctctttaacattcaagtcaaagaggtcacgcagaatgacggtacgacgacgattgccaataaccttaccagcacggttcaggtgtttactgactcggagtaccagctcccgtacgtcctcggctcggcgcatcaaggatgcctcccgccgttcccagcagacgtcttcatggtgccacagtatggatacctcaccctgaacaacgggagtcaggcagtaggacgctcttcattttactgcctggagtactttccttctcagatgctgcgtaccggaaacaactttaccttcagctacacttttgaggacgttcctttccacagcagctacgctcacagccagagtctggaccgtctcatgaatcctctcatcgaccagtacctgtattacttgagcagaacaaacactccaagtggaaccaccacgcagtcaaggcttcagttttctcaggccggagcgagtgacattcgggaccagtctaggaactggcttcctggaccctgttaccgccagcagcgagtatcaaagacatctgcggataacaacaacagtgaatactcgtggactggagctaccaagtaccacctcaatggcagagactctctggtgaatccgggcccggccatggcaagccacaaggacgatgaagaaaagttttttcctcagagcggggttctcatctttgggaagcaaggctcagagaaaacaaatgtggacattgaaaaggtcatgattacagacgaagaggaaatcaggacaaccaatcccgtggctacggagcagtatggttctgtatctaccaacctccagagaggcaacagacaagcagctaccgcagatgtcaacacacaaggcgttcttccaggcatggtctggcaggacagagatgtgtaccttcaggggcccatctgggcaaagattccacacacggacggacattttcacccctctcccctcatgggtggattcggacttaaacaccctcctccacagattctcatcaagaacaccccggtacctgcgaatccttcgaccaccttcagtgcggcaaagtttgcttccttcatcacacagtactccacgggacaggtcagcgtggagatcgagtgggagctgcagaaggaaaacagcaaacgctggaatcccgaaattcagtacacttccaactacaacaagtctgttaatgtggactttactgtggacactaatggcgtgtattcagagcctcgccccattggcaccagatacctgactcgtaatctgtaa

SEQ ID NO: 348 - DNA, 1602 bp, Artificial Sequence
  synthetic sequence
atggctacaggcagtggcgcaccaatggcagacaataacgagggcgccgacggagtgggtaattcctcgggaaattggcattgcgattccacatggatgggcgacagagtcatcaccaccagcacccgaacctgggccctgcccacctacaacaaccacctctacaaacaaatttccagccaatcaggagcctcgaacgacaatcactactttggctacagcaccccttgggggtattttgacttcaacagattccactgccacttttcaccacgtgactggcaaagactcatcaacaacaactggggattccgacccaagagactcaacttcaagctctttaacattcaagtcaaagaggtcacgcagaatgacggtacgacgacgattgccaataaccttaccagcacggttcaggtgtttactgactcggagtaccagctcccgtacgtcctcggctcggcgcatcaaggatgcctcccgccgttcccagcagacgtcttcatggtgccacagtatggatacctcaccctgaacaacgggagtcaggcagtaggacgctcttcattttactgcctggagtactttccttctcagatgctgcgtaccggaaacaactttaccttcagctacacttttgaggacgttcctttccacagcagctacgctcacagccagagtctggaccgtctcatgaatcctctcatcgaccagtacctgtattacttgagcagaacaaacactccaagtggaaccaccacgcagtcaaggcttcagttttctcaggccggagcgagtgacattcgggaccagtctaggaactggcttcctggaccctgttaccgccagcagcgagtatcaaagacatctgcggataacaacaacagtgaatactcgtggactggagctaccaagtaccacctcaatggcagagactctctggtgaatccgggcccggccatggcaagccacaaggacgatgaagaaaagttttttcctcagagcggggttctcatctttgggaagcaaggctcagagaaaacaaatgtggacattgaaaaggtcatgattacagacgaagaggaaatcaggacaaccaatcccgtggctacggagcagtatggttctgtatctaccaacctccagagaggcaacagacaagcagctaccgcagatgtcaacacacaaggcgttcttccaggcatggtctggcaggacagagatgtgtaccttcaggggcccatctgggcaaagattccacacacggacggacattttcacccctctcccctcatgggtggattcggacttaaacaccctcctccacagattctcatcaagaacaccccggtacctgcgaatccttcgaccaccttcagtgcggcaaagtttgcttccttcatcacacagtactccacgggacaggtcagcgtggagatcgagtgggagctgcagaaggaaaacagcaaacgctggaatcccgaaattcagtacacttccaactacaacaagtctgttaatgtggactttactgtggacactaatggcgtgtattcagagcctcgccccattggcaccagatacctgactcgtaatctgtaa

SEQ ID NO: 349 - DNA, 360 bp, Artificial Sequence
  synthetic sequence
ctggcccaccaccaccaaagcccgcagagcggcataaggacgacagcaggggtcttgtgcttcctgggtacaagtacctcggacccttcaacggactcgacaagggagagccggtcaacgaggcagacgccgcggccctcgagcacgacaaagcctacgaccggcagctcgacagcggagacaacccgtacctcaagtacaaccacgccgacgcggagtttcaggagcgccttaaagaagatacgtcttttgggggcaacctcggacgagcagtcttccaggcgaaaaagagggttcttgaacctctgggcctggttgaggaacctgttaagacggctccgggaaaaaagaggccggtag

SEQ ID NO: 350 - DNA, 615 bp, Artificial Sequence
  synthetic sequence
ctggagacgcagactcagtacctgacccccagcctctcggacagccaccagcagccccctctggtctgggaactaatacgatggctacaggcagtggcgcaccaatggcagacaataacgagggcgccgacggagtgggtaattcctcgggaaattggcattgcgattccacatggatgggcgacagagtcatcaccaccagcacccgaacctgggccctgcccacctacaacaaccacctctacaaacaaatttccagccaatcaggagcctcgaacgacaatcactactttggctacagcaccccttgggggtattttgacttcaacagattccactgccacttttcaccacgtgactggcaaagactcatcaacaacaactggggattccgacccaagagactcaacttcaagctctttaacattcaagtcaaagaggtcacgcagaatgacggtacgacgacgattgccaataaccttaccagcacggttcaggtgtttactgactcggagtaccagctcccgtacgtcctcggctcggcgcatcaaggatgcctcccgccgttcccagcagacgtcttcatggtgccacagtatggatacctcaccctga
